United States Patent Application Publication US 2022/0211063 A1 - sequence listing, part 39

SEQ ID NO: 105 - DNA, 4395654 bp, Penicillium roqueforti (residues 2,930,437-4,395,654 of 4,395,654)
  misc_feature (85032)..(85336): n is a, c, g, or t
  misc_feature (96912)..(97035): n is a, c, g, or t
  misc_feature (167457)..(168881): n is a, c, g, or t
  misc_feature (174735)..(174875): n is a, c, g, or t
  misc_feature (186965)..(192855): n is a, c, g, or t
  misc_feature (360823)..(361014): n is a, c, g, or t
  misc_feature (391959)..(392118): n is a, c, g, or t
  misc_feature (496716)..(496904): n is a, c, g, or t
  misc_feature (596248)..(596477): n is a, c, g, or t
  misc_feature (682798)..(683428): n is a, c, g, or t
  misc_feature (719087)..(719175): n is a, c, g, or t
  misc_feature (843422)..(843591): n is a, c, g, or t
  misc_feature (1092721)..(1092892): n is a, c, g, or t
  misc_feature (1157553)..(1162652): n is a, c, g, or t
  misc_feature (1192588)..(1192765): n is a, c, g, or t
  misc_feature (1228267)..(1228378): n is a, c, g, or t
  misc_feature (1338795)..(1338950): n is a, c, g, or t
  misc_feature (1570178)..(1570379): n is a, c, g, or t
  misc_feature (1572427)..(1573064): n is a, c, g, or t
  misc_feature (1778995)..(1779142): n is a, c, g, or t
  misc_feature (2068487)..(2068564): n is a, c, g, or t
  misc_feature (2226929)..(2227148): n is a, c, g, or t
  misc_feature (2309644)..(2309799): n is a, c, g, or t
  misc_feature (2399265)..(2399444): n is a, c, g, or t
  misc_feature (2468197)..(2468413): n is a, c, g, or t
  misc_feature (2498734)..(2498793): n is a, c, g, or t
  misc_feature (2576637)..(2576892): n is a, c, g, or t
  misc_feature (2701425)..(2701645): n is a, c, g, or t
  misc_feature (2766528)..(2766643): n is a, c, g, or t
  misc_feature (2901310)..(2901574): n is a, c, g, or t
  misc_feature (2994310)..(2994455): n is a, c, g, or t
  misc_feature (3046176)..(3046296): n is a, c, g, or t
  misc_feature (3064322)..(3064652): n is a, c, g, or t
  misc_feature (3131107)..(3131265): n is a, c, g, or t
  misc_feature (3155041)..(3155788): n is a, c, g, or t
  misc_feature (3156743)..(3157054): n is a, c, g, or t
  misc_feature (3187005)..(3187665): n is a, c, g, or t
  misc_feature (3198552)..(3198823): n is a, c, g, or t
  misc_feature (3203257)..(3205231): n is a, c, g, or t
  misc_feature (3205958)..(3206270): n is a, c, g, or t
  misc_feature (3207716)..(3207874): n is a, c, g, or t
  misc_feature (3257409)..(3261006): n is a, c, g, or t
  misc_feature (3261812)..(3386811): n is a, c, g, or t
  misc_feature (3388273)..(3394703): n is a, c, g, or t
  misc_feature (3514038)..(3514368): n is a, c, g, or t
  misc_feature (3520886)..(3521278): n is a, c, g, or t
  misc_feature (3528699)..(3531253): n is a, c, g, or t
  misc_feature (3533644)..(3533755): n is a, c, g, or t
  misc_feature (3544131)..(3544318): n is a, c, g, or t
  misc_feature (3640988)..(3641179): n is a, c, g, or t
  misc_feature (3768183)..(3769905): n is a, c, g, or t
  misc_feature (3862530)..(3862864): n is a, c, g, or t
  misc_feature (3867901)..(3868538): n is a, c, g, or t
  misc_feature (3874100)..(3874791): n is a, c, g, or t
  misc_feature (3907480)..(3907707): n is a, c, g, or t
  misc_feature (4023569)..(4023725): n is a, c, g, or t
  misc_feature (4214675)..(4214820): n is a, c, g, or t
  misc_feature (4215907)..(4216419): n is a, c, g, or t
  misc_feature (4384696)..(4387115): n is a, c, g, or t
  misc_feature (4389540)..(4393053): n is a, c, g, or t
  misc_feature (4395652)..(4395652): n is a, c, g, or t
cgtagtcaagcatcagcttataatgagggtcaattaaagggtcccgacgaatttgttccttctcctcctcggttcggacaccagtgtgctgccaaaacttataaaaggaaggatccaaaatcttcttcaagttgctccatgtcatccaagcccatccaaggctgacttcagcgtagttccagagcaacatgtgaacaatagtggccgtgagcccagcgttggatgtgatgagatagttcacgtacgtggcggtaaggtaaggagctccagcctgatccaccagggtgctgttcacggtgaagtctgcgttcatgattgcagtctcgttgtatgggacagcagtggtcgtgtttgagctctgatcgtagagaagctgagacatgaaagggaaatccttggctctccagatatttccgtagtaaagtgccatggagaggatgatacccccgatataaccaatgaaactgttggccaaagtttgaagcggcatccaaagtggggatccgaaaccggcgatataattccagtcaaagcagacggacaggaatcccatgccctcattaccctgggagcctccgaacagatttgtgaagatcagattgtgttggtcggccaagcagaaaatggaaaccgcggacaaaagtgggaagatgtactagatattgtcagagcctgtaaggtagatcgatgtggttgagcaaacgtacctcggggaaccattcccagcaaaagatagccgcgaatacgatccagaataccttgaatctctgcttggtctccgctttgggcttgtgcaaggtctccatgacagtcgtgatgggtaggttgatgggatacagcattgaggtggggtgtaccaaaacattgcgcatcatgcctgcaacgccatacccaatgagctgcgaagaaagcgtaatgaagattcccgcagctacattaggatatcctccataatagagcttttgcacagccaaagcttccgtagacaaggccgagacagctgccgccgaggacatgaggactgctgcggtgtgttccttccggttccacgggaaagggttgagaaaacggccgatgacaccccgtcgtgggataaaggtagacatagccgtacccagagtttgagcaaggacagtcaagaacatgaccgagacgtaaacaacctggggcttgaagtacatgatctcttgcaggaccgctccgaacgcggacaatccgagacctgattcgagtcagcgacatgctagattaccacagaggacacaatgaaaaggctcaccaatgaagaacatgcggaacgtccatggattgagtgttgggtcatcgtcaacatgaatgacctgagtgacgatctcctccgcagtttgaaggggagctgcagtccccttcgagagagcttcggcgtcgtcataaatcggaagaggcacttcgtgaatagaagggacctggtccttttccccgcccttttccccaaacttttcgctgttcacctccgcagagggtacgcgctcaaccagggtgtctgttttagttggcgtcgtcgccatgtcgaataacaagtgatgtgatgtctcaggaggcaggactcagaagtgagagatgttcaaaaggtcaagaaattgccaggtcgggtctgctgatatatcatcgataagaggagcgcaagaagtggcattcccctcccctcccctccccctggactactagcgctcgagcccaaggttcaagaaacccagctcatagcacgataaggactaatcccagcctgtgatcgaacgtaacaaccacttgtcctaaaacagaaggtggccacaggccttagattggcgcgcccacctggattcggtattaccgacggggcgccgtcgagcaggattccaatgcacgaaccagatacaccgctgcgacgataaagatgcaggtctcacctcgtagtggcgtgccatccatcccttgtattggataaggaataagtcactaaaacgcttatacgtaatgtggatgccacgctaagctatctccaatcccacccccggaagcattgtacaatccgagacgcttctccgacggagtccgcgcgctgtcccgaactcgaccaaaggggctatctgagtttcgtcgccataacccgctcaggaacaggcgagtgttgtaatatgttgtagagaaataaactagggaagggccattgtttcaattgacaaagagtcaaaaacattggtgttattactggtataccgaagttataccagtctggacggtcaggctaagctttttcccgtataaatgctatttcgcttaagctaatccaagccttcgcaagcttttccccaagctttctcgctcaaagtggaacttcaagtccgtggaggggccatgttacatttggtggcggagatatcttaattatgaggtctaatcctgtcgccattcacccgatgtatcatttcatttcatatcactccaatcagaccggacaaatcaatcaagatgttgttagccgtcgggtgacttactcttttaagactgaacttgaagacgggaatcttcgaattcggtcttacctcaggctcttacgagttgattcccaagtgataaatgtgcaatcaagtcgcaccaggtgctgactaacatgacacgtgattgactggccctccctcacctcttgagaaaacaatgcgctccttgtccgacagcaattgtcctggtgaggacgacctaaccgcagcgatggatttgactcaacaatttcagcctcaacacacgcataaatgagaatcattgttgcgacttgaaaattacgagagatggaatctgctttgactgaccagctcactgagtcctgcgcccggactactcagtgagccttcctctgaacgcccccattaaagccaagacacaatccgggggaggaaaactataactatcgagcgcggaatactgcgagcgagatttatcatcaagttgaaccatttcaggtattctgagatggatgattaatctcaccatgcacgatttgaaatcaatctgacacccatacctaccattaggtatcgtaagattccgcgatcacccaacatctataaatattgcgaatatcaaacgccataacgcctccacctgggagcttcttgacatccaacatttacattctgttcatagctctaaatatcatattcaacccaataattactccattcatatctaaacatcaacatggcaaacatcaaggttgctcttgccggagtatgtcagcaaacgaccctcatactatcccattctctaacatgatccaggccagcggaaacctcggtcccgccgtactcaaggaactgctcgccgcaggctttgacgtgacagtcctcacccgacaaggcagcgataaaaccttcgattcccgcgcgcacgtcgcacaagtggactacgagtccctcgactccctcaaggccgctctgtctggacaagaagccgtagtcagcactctacatgtcggcgcagttccgatatccactcatctgcgcttgattgatgtagcagtagcagctggtgtcaagcggttcatcccgtcggaatacggctgcgacaccacgaatcccctcacgtccaaattgcctgtctacggcgataaggtcgtcatccaggaacatctcaagaatgtcgctaaggaatctggcctcagctactcgttcctcattactggtcttttccttgactggggtcttgagaagggtcttatagtcaattttgctggcccggcgacgctgtatgatggcggtgatcgccgttttagtgcgacgactctcgctggtattggcaagggagttgttgggatcatcaacaaccttgacgctactaagaactccacggtctatatcaatgaggctagggtcacgcagaatgagctcctggaattgtctggaaagagccttgagacgaaggttgttcagactgcagatctggaacagcaggcttttgcggaactggctaaaccggcccccaaccggacaatctttgctacgaatttgattctgcgggctgtctttggtgaaggatacggcggtcttttcgaccctgagaaggtctcgaatgagttgtttggtctgaagattttgtccaaggaggaactccgcggcctgatccccaagtaatcgttcttttcgataatagtctcagatgttccgttgtatacgtcgagtgcgtatatcaatccaattaatcaatcaatcttattcctcttccgtaccttatttagacagggtaccaatcacctaaatatgtgcaccgcgtaataatatattcaaactcgagtcaaagaaataaacacgaagccaatatagacaaagtaaacaaagccaataattcacagtaaagtatcaagcccacttattgagccgaacactgtccaccgaccacacagagaacaggcagatcagcaacactattcccaacccagagcttaatgccgcgtccattgacaggagccttccaatcctgcaccacaacatcccaaacactaacgtccttccgggtaatatccagcgtaaccgtctcactctgaccaggcgcaagctcccttgtcttttcaaactgccggagctgcaaggccggcgtctccagtcccagactagacggaagctcaacatacagctgggcgaccgccttaccggttcgcttacctgtattctggacctccaactggaccgtaaatacagtctcgaagagagcgggattccccccctcgccacccccggcccgggggactgcatgcggctcggtgctgtagccgtccgggtaggggtatgtattcgtggcagtgatcgactgcgggttggaaaggtaggggtaaaggtagcgccagatgcgggtgaagctggtagacgaccaggcgacttctgacgcgtccggaatgctggtgttgtaggacagggttggcggctttgtgggtcgtggagctgggtaggctgagtctagcggggtttttgttgacagcgaaggctgggaaaagttgaaggtggtgtaggagagaccgtggccgaatgcgtaccgaggtgtgatattggctttaatgaagtggcggtagtcgatgtataacccctcggtataggtatcctggatctggccgaatggttggctgatcaatcccacgctatccgggtaattatcttcgctgcgaggaatggtgtatggcatgtggccgcttggactatagtcgccaaataggatatcggtaagggagttgccagcttcttgtccagggagatgtgccacgatcactgctttcacggacttgagttcaatccactcttccatcaggatgggcccgacggtgtgaacaatcacgactacattggaaaacttctctgctgctgctttgacgagatcgtcgccatcgtgccaagcattgagtccagcttcggttcgatctcccgggttcccttcgactgtgatatagttttcgcctgaatcggcactgatgaagacgagagcgatatcgttggcattggcggtaacgtctgaggggaagttgtcggtgatgtggaactcggcattcttggtgatattagagattgcctcttgcggtgtgatcagatagggtagcctggctgtgccactgccccagcccatggtcagcacgcctttgttgcacccttggtcggcgcatgagttgagaccgtctggatttccacctgcgtctgtgccgaataccttgagagaatcattgctacgcagaggaaggatgtccatatcgttcttcagcaaggtaattgcttcccgtgcgacggctctcacggtgatgttgtgatttcctctcacatcgacaaactggttaacgacaccagatggagaaaataaagcaccggggtaaagcaagccctccttatcctgggtgttggtcgagaagtttggcaagggatagtccttatcctgtccgtgtttgtaccaagtagcaacgatacgttgaacctagacccgtatattagacatgaaagatttcacatagaggaccacgtaccatatcgttgagacggtcgacgggaacactgccattcaaaactgaacgcgacagctcaggaccccagtatgaatctccgaacaaaggaactgctccatcgccaggcatggacatatccaaaccagctatggccgacgcaacgccagagtaatgacccagccagtccgtcatcacaaatccttggaagccaagctcatccttgagaatcccattgaccaacttgctgttctgagagcacgaagagctattgacctatcagatgtcagcaacacacacaaaataaggactgaagcgactcacatcggaataagctgtcatcaaggacccaacacccgcacgaacaccctcggcaaaaggccagaggtacagttcatgcaatgtgcgatcatcaatattagacgaatagccctgggtaataacacttcccatgcgatgcatttcctgctcattaccaatgtaatgcttgatagccgcgatagcaccggtactctgcataccctttatagtctgggcacctccaaaagcctgcagaacaggatcagcaccgaagccttcccagttccgtccaccgcgtggcttgcgtcccagtgctcccacggatggtccgaggagcacattgacccccttaccgcgagcctcctcgccgagcccaacacctctctcatacatgagctctttgttaaaggtcgcgccaaccgtgataccaggcgggaaggcagtattgtggtccgagttgcggactcccagagggctgtcttggaggcacaagttgggcacacccaggcgaggcacgctgcctgtctgccctacgcagggccccatgaagaagccagtgcctgtagtcagattgactttctcggccagcgtcatattactgacgagaatatgcgccttggagtaggcttcactccagtcggagatccagcctcctggaggtgtgggatagtatgcaggtgattcatagccttctgctgctctctcgtgtaggtgggtagtagattcgaattcttctggtactggggaagctaggagaagcggggtcaaaagagagactagagttagatgcacccaaggagccatggcgatggattcgctatgaacaaaaagaatgtaagaaaagatcgtatattggccagtcaagagaacgagtgcatttttttccaggttcgaatccggggattccaaacagacaggatcgccaggggctataagagaactacagacggaggaactacgtgggaaggagcaacgcccgcgtgcatgtctcggggaaatgtatgttcacgcgtggacgcgtggatgatctttgctggattcgaggaggatcgtcatgggaacccgttgatattgcacttggcagtgcactgaatactaagaacttgtcacgatttttcaaggatcgactcgtgactagtctactagtgaattcactcccatgggcgagggctgcctgacaagaaacccgaatgctgataggctgcatagtgtcaggggttcagcaattaaatatgcaaaccagcacccccttttcttcaacaattcactgtccaagttcattcagtcaatagttcatcgagatattccaatgttactgtagatagaacacgcggcactggcccgcttgatcgccattgaaatgataattgctcaatttcattcgttgttatacatgtccacgtctttagatcttggtgtagcgcaagtaaggcttgacctcgcgaacttcaccaaacttcttcttggcatctgcggtactcacagaaggaggcacgatgacatcatcaccaacgttccagtcgatcggggtagttacacccttcttatcaccggtctgcagggagtcgatgactcgcaagacctcagcggagtttcggccggtggaggcggggtacatcatggtcaggcggatcttcttgctcgggtcgataatgaacacggagcgaatagtaaacgcaacttctttttgcccgatgctatcctcgtcgatcatgtcgtacaagaaggcaactttgcgctcggcatcggcgatgattgggaacttgacttgagtcgagccgacttcgttaatgtccttgacccactggtcgtgggaaccgagctcgttggcactctggagagagtgggcgcatcagctaaggctctgtggaagttataaatggcactcaccaatccaatcatcttgacaccacgtgcgtcgaactcatgctgaagccgggcgaaggcgcctaattcggtggtacacacctaatttcgtgttagttcagtgtcttcgtggagcatgttggtgagaaatacgggcgtgaagtctgcagggtgtgaaaagaggatggtccacttatcaccgatgaactcatggaagtcaatctcgccctgagtagtcaatgccttgaagtttggggctgtcttgtgttagcatggtatattggcaatgcaatcctgttgaaactgtaccaattgagcccaagcgcagatgcggctgttccaccttagccgagtagaggcggctgaaagcgggcgcacgaggcacctgcgcagaccacgaagcccgtggagcagcgccgagggcacggaacatctgagagccaattcttgaagccatgattgttaagagtgaaaggtgcaatcttccaaaatccagagttgacgttgactactcggggacttcagaaacccctgggccccgggaacccggtcgacgtcatcaaatctgactaagcggccacttccgcggtgctgcaacgacgtatcacttccaaggttggtttgtcttcacgccagatatatatctcatctttctagtactgaatctgaatattccttgtattccttcaaatatctcgtatattgtaccatctaaagtacggaaattgcacaatcaagatttatacaaatcctacaagatccatttatagaacgccctatccatatatccgagacatgaagtactatatatactatcagacattccgatgtacggcgtgggaaatttgacgccatccacgggttaaactggagtcaatgattggaccaattagagccccaaatccgagacccttaatcgacacttggtcgatgtccacaatgaagtcagccaatgccgcccgtttaatagcttgaatgattcctacgagatgaaaataatgtatatttgactaaaaaaggagagtcgctatacaaagtatcatatggaacccttgctatcccttacgtatgtatatacactgatttacctgatatataatgcataaggaagcttcacaagtcgagaccaagcttttgtgggccctcgaaggatctttctaacaaagagacggcgtttccctgaaagttggcagatccctttttgaaagtcttatctttgttcttttctcccgaaaggtttcgccaccatcgatatgggacggcttcactacctactcggtttgctgctattgttcatttgttcatttttctggatcgcatcgaatctgggaaaacaaccattaagcattgctcttactcatacacctcgtgaatcttgcgtctgtagcgaagacaatgttactgtcgcctcagatgtcggtatcataccgtcaaatccaccggaacctcctattaataaagatatgaggccaatatcagaaccacaaataccaagctacctgccaatcgcgaatccccatggtcactacgcacagtcctcaatcccattaaagctctggcaaaaggccggttcaacgaaaatccacgacgaccgccagagagatatcaacagttggctagatgtgaacccacgtctacgacatgagattctcacagacgacagtgcagacgagtacgttcgtgagcattttgccaactacccagaggtccttgatctctatctctcacttccggtcccaatcctaaaagccgatctccttcgtcaattgatcttgtacgccgacggaggaatttggagcgatcttgacgtgacatgtcacataccaatttatacttggatcccggaacaatttcaaaacaaaacaaacgtcgtcgtcggtttggaattcgacgggttccagttcgcgagttggacgatcatgacaaaacctaagacaagccatatcgtggcggtcatgaaatatatcatcgatagactgaaggcatctgctgcgcagtacaatgtgaccactgcacaacttaacatgacgatgatcagcgatgtggtggaagttacgggtccccaggccatgactattgctctattgcagaatctggagaaggaaatgggcgttcctttcggccgggcaaatataaccaacatcaaagaacccaccctatttcaggacgtactcgtgttgcctaatgcggccttttcctctagacaggctggcttcccggcggacagagggccttatctcgttgaacaccattacgctggctcttggaagaatgtcaatggtggcgaggcgaaatcttgacatattgggaattttgtattggcgttgcaccgcacgaaatatatgtggcaggacggacatagaatcatgataaacataatctaattttgcattcagcgcttgatcaaatttcgaggaaatgactgttgatagaagaataagtttatgtagtttgcttctatcgtgccgtgtaattttatgctgaatctgctgtctgctgcttgataaatcgaccggccaccatataaaccgccgagggaagaacacagcccggtaaacaagatcgagcatcaattggtttctattttactcactcttccctcacttgatccttactattttctcagttattcctcactctcctctcaccttcctttcgggttgaatataacagccaagcgctagccgaccttcccacggatatcccgcctttccaccagtctacaacccaccccaatcaatctatacgtcatctacagtgccgacccctatgatagcactgattgtggatctactgcctagggcgtatcaaaaccgatatgggcgttgctggcgggggagcaccaaaatctctcgaagtcgtgaccatctcatttacccctgactgattggacgtgatcgtcatcctaaaatcactccctccaagctcaagtacatggtgcacgtcccgttctgtcttggtacgatgaaacaatcttcctcacattctccgtggcagccagactcacctggtataccaaagcatagccgtcgcttgattctcaaacggagcgacacagagtccttcctagcacagatgcctacacggtggttacgggcccgtaataatggtgagtataattggtaccaagtcactgcggtcgcaagggagtttgacgaaagtcagcgctgatccgtgctcgttggtccttggccaagaaatatggggttcggaagggaaatcgtggtcaactggacaagcaagccactgtcattgcgcaggtggcgactgacaatagggcgtgagagtcgaagctggtcaagctcgagacagagaccgagactatgtggcccacacagctgactagcttcagtctcttcacgacgctgccaccgcgctcagcaacgaaaacgcggacctccgccagcagatccaggtgacccaaccgtgtgagggtgtggttcggagacgaacaaggcattcagggccgttttcaacagtcagtgagacagactattggagcggtcctggaggcccagtctatcggcgtaagtcttggtgatttcaaagcttctggtcttgcttacaataaagtcccgggctgcgtctgcatcacaactaacccgattagtctccctagactcaaagctataggatagttgaaagttcaatccagaggagcaagcacccactccaagccatccagaaatacccatagaacagggagacacagctgaagcggtaatgcaattggttgaggatcccttgaccactcaatatgtctttggtacagacatagcgtcaagtgattcggacaatgaaggagtaccaagttcctttcttgatgaccaggaggtaggtctctattatcgagtttaaaatgagcatgtctaacgaaagaatatatcggagatagatcagacgttatgggatatcgttgaaaaccttctagagagcctaccctagaatcactgagaatcctacacgaggaagcactccttacgagagaggcacaactccgggtgacttgccatgcaactcaccgagacgccatgatacacactgaagcacgctagtcgtggcatacgttctaagccatatctataagtttggtgttgcttgttctataattgagatgctaactggatggcccacatagtattcgctcaatcaacttaccagcctctacattggaaacgttatgcgtgaatgtcaccgagaacccacaaggtctcagtggaggagctagtcaggggagtgccattttcagagccctctctcgttgtcgaggtttcttgaacagcctttgaagagaacacaagagccattggactttctacctcgatacttttctatcaactgcttatttcagtatcaactttgctaccctatctatcaactgcctatcagaaaaaatacccaaggccgtagatggttctatcaaagagagagttttctcgctcaacaaggatttacttcgtagctccggatcctatgctgtcacacgctacggctacagtttgctcagttcaggcacctgctgctcctttaagggagaccgagcaaaaacacttacggcattcaaatagagctgtttgttcgaaatattcatagttcaggtgaatatctacatgtaactaaggaccgggcttgggagagacggttgatgagcaggtcttgagaagaatcaacttaaatgaagtaaacacttgctagtcaagatatccctggttcagttgctaggaacgaccgtatcccaaggttggcaagctttgtgctttctagtgtcaagacaatggaatggttccattggttcatgtatgtgatctacacgggccgcaaagcttaacctattgagcttaaaggcccacaatagaaaataggccacaatagacaataggccacaatgggttggtattgtgttgggagcctattgatggctattgatggctattgtggcaattcattgtttggagggggttgcctgggcagggtccgtttgaatgggcagtcgttcaattgaggaaggaacgcgtaggaagaacaccgcgtaggcctgcctataaaacccaaccctcgtttttgttttctctttctcctctctctctcttccccctcacacatttatcgcaagaaccccattattaccaacaacaatggctgtttctcgcgtcgtgtttttcgtgcttcttgcggccatggccgcatactggcacactgatcttttccaactcgttggaaccatcgtcgtctttctcgttgccttggtggcagcgggatgctgcatgagcaggtaagtttggaagccttcatccttcatctgtcccctccgtatggccagcctctgggtcatgtctcatggcatcaaaagagttgccatcactgccttgcccaagactcatcccacgcccatcccaactccatcactgccttaccgaagcccatcactgccttgcccaagtcacatcccaagcccatcccaagcccatcccaagtcacatcccaagtcacatcccaagtcacatcccaagtcacatcccaagtcacatcccaagtcacatcccaagtcacatcccaagtcacatcccaagtcacatcccaagtcacatcccaagtcacatcccaagtcacatcccaagtcacatcccaagtcacatcccaagtcacatcccaagtcacatcccaagtcacatcccaagtcacatcccaagtcacatcccaagtcacatcccaagtcacatcccaagtcacatcccaagtcacatcccaagtcacatcccaagtcacatcccaagtcacatcccaagtcacatcccaagtcaaatcccaagtcacatcccaaacactcactcaaacactcgcccaaaagaccattaagactaacgttgagtagctcccgtgggtggttgttccgactgctgcaagctgcagcagtgtcggtcgttgaaccaacaccgaccaacgacacccccgccaccaaggccatctcggccaccgaggccgagatgaagagaatttcgacactgagagcgcaggtggggattttggagcagcagctccgtggcacggaggcacgagtgcgtgactccgagaaagcccgggagatggagaaaaaccgccatgacaaggaggtccggaacaaggacgctcaactggcaaccatctctcgggggatcaaggagtcccggtacgtgaaggaccaggtcatcgtcgagtgccgccagtggcggcgcaagttcgaggacctggaagacctacagcgactggcccagctaaatcccgttcgcgggatgcagggacgtactcgttgggcccctgccaacaaaaacggagtgcgaaaggggaatcgtgctcgaccggacaaggagttcactgccgttgcgcaggtggcaattgtcaatgcggcgtgggagtcgaagatggtcagcttcgagtccgaggcccgtgcttatgtggcccgcacggctgaccagattcggtctctcaacgacgctgccaccgcgctcagcaacgagaacgcgttcctccgccagcagatccaggcgacttccggcatctcccacgagctggcccagcagcaaatgggggaggctgtgagaagcgccttggtgaacgccgagcagcaacatgaggagcgtgtcaagttgctgaagcagacccatcttggggagctgacggcagtcaaggtcgactacgagggaaaattgactaaggcgaccgcggaatcgaaggcggaggcggagaccgcactttcccagcagcgtgaggtaggcgagggagcggcacagcacgcactcgccaccaaagaagcgcagctgggggagctgcgtgccacactctcccagcagctcgaggcgagcgaggcagcggctcaggagacaagttccctgaagcaggcactcgccgccaaagacgcacagctgggggagctgcgggctgcactgtcccaacagcatgaggcgggcgagggagcggcacagcacgcactcgccgccaaggaagcgcagttgggggagatgtggaccgcgctgtcccagcagcgtgaggtgagcgaaggagctgttcaggagacaaattccctgaagcatgcactcgccacccaggaagcgcagctgggggagttgttggccgccaatgccatgatttccgctgagctacaggctagtaaggaagagcaggagaaactggatggtgacatggaggtcgaaacctccagggtcgtccagtacgtgcaagagagggacggcgctattagagccggcaagaaattgcaggagcaattccatgccctgcaggagcagtacgaggaactacggtcctcgtacagcgaccttgcggtggagaaggcgggccttgaggtagaaattggggacctaaaggaagcagtgtccgacctcgccgaccaaggcgaggcgatgtaccaggaggtcgaaggcctcgagggcaacaaccgagccctggcaaatcaaaactccgagctcttttgccagtctttggcatcagacatggagctccagcagactcgggacaaagtgggcaaccttgagcgccaggtgacggattaccagacggcggaggcggcggacatcacgtcggcggttagcggcatggggttcaacgctgaataagcgcccatccgcccgtcttagcctcccccggtctccgtcatcctgctgcagctcggttgctcactttgttgttgtcctcacactgcttcctataggttctcaacccgcccccacctccctctctatcttccttgctgttgtctttgtcttccccccccctattcctcgctgttccatccctcatctgatcaccccctctcacccccctctccggcgcgaccgaccccccgcgaccgaccctatatatatacatcgcagcatgtctcgctaatgactctcggtcccatgaattcaccataccgctcgtttgccgctcggccagtgatgctgagtctggccaagcttgtgctcgttgcgatatggcaaattcctttcaccacggcggcgcctgtcttctcgcggcttgttctgtcatctcccgacacagaacaggggaaggaaccgagcgatccaagtttatggctttatttgggattttcggctgctcttgtgttgagcggtggagcattcgcgggtcttacgattgccctgatgggacaggttagctctttccaatgcggctaaaaaaaaatccccgatgagccaggctaacgtcttgattgtttcgtacaggatgaagtttacctccaagtcatccagacatctggcgaagggcacgagaggaaaaatgctactagtgttctcaatctcttgaaccacggaaaacattgggttcttgtgacactactcctcagcaatgtgatcacaaatgaaactttacccattgtccttgaccgcacgcttggtggtggttggccggcagtgttaggaagcactgctttgattgtcatcttcggcgagattgttccacagtctatctgcgttcgttatggtcttcccatcggtgcctggatggcgccttgcgtcctggtcttgatgtacatcatgtctccagtcgcctggccaatcgcaaagctgctagacaggctgcttggagaggaccatggtaccatctacaaaaaggccggattgaaaacactcgtcacactccacaaaacattgggcgaagccggagagcaactaaactccgatgaagtgaccattatcagtgcggtcctcgacctcaaagagaagtcagtcggcagcatcatgacaccgatggatgatgtcttcaccatgtctgcagacactgtgttggacgaacgcacaatggacctcattctttctcagggatattctcgcattccaatccacgctcctgagaatccgatgaactttgtcggtatgctccttgtcaagatgctcattacctacgacccggaagattgcaaacgggtccgtgagtttgctctggctacacttcctgaaacacgccctgaaaccagttgtctcgatattgtgaatttcttccaagagggcaagtcacatatggttcttgtatctgaatatcctagcgaggatcgtggtgctcttggagttgtcaccctggaagatgtcattgaagaactgattggagaagaaatcattgacgaatctgacgtctttattgatgtccacaaagccatccgacgaatgacgcctgcacccaagtctcgtgtcgccaaaggcaagatcgtcgaggaacctcctttgaacccctctatcattcccgatggcgacttgatcgacgtgaattccacacaaccctcatctttccctaggccttccgatttgattcgccgccgcagttccgtggaagcacccctccctcgctttcaacttcgaaagactactgccgacataaattctgactcggcaaatgagtgggttacacaagtcggcgccacagatgagattcgagaacacctgaaacatcttggtccttccaatctggccagtaggccgcgccaaacccgttaccattccgtcaagatcaagcgcaacggcacctctccgtcccgttctgcacaaaccgactttgagtccggacaaagcacctccgactcccaaaagcttcttccttcttctaccgcataccaaggtggcataggtgcgggcttgctcaactccgctggaacagacgcgaaagacggtgcgcatgctctcaaactgggctacggcaccatgctttcgcacgacagtgtaagcaaaagcaccggtgctcatcaatacaaggaccttccccaagtctccattcccgaggccgttcgtgaggaacatgaagacctaccgcgttctgggccggcgcgggaggctagtagtgatgctctacgtgacgattccgaaaaccaaccgcgttctgggccggcgcgggaggctagtagtgatgaaggcagtgttgaatcgtctggtacaccaggcttcgtttaccaccaccgcggaccggcgcgcagtggaagcatcacagaacagatcgtggatgtcaatggtatccggaaagttgttctgcatgcaaattgcaccagttcttccgagggggaatcccatgcaccaggccatgatcacaaccacgaccagcatcataccgatggtgcggtccttgagaccgatgttacaaaattcgaaacccccgacgccggccacgcaaaacccaaaaagaagcgtcgccgaaagaagcatggcaaggcttcaaagtctgatggcggtccctcagagaaccagccgttgctttgatgagccgttagttagtttaatgagacctgtcaaaccatgtattttcacttctttttgtaccacagttatgcctgtagtcatgagatgtaaaagcgcctccgggaaagtctaagtatatttgcattgctttggaacggtatatgccaactaagaagcccaaagcctcttaactcgcgtaggaacttgatataccacatgaacactgggagtagatttcagtcaccttggacagcaattgttgatttaaatgcaacattcgtggagagaacccagaacaggccagcacgcatttacatgtagactcttaaggaacgaaaatcaccacctttgagaaagttgtcttacccataggtaaactatcatgttaccacccactgcctctttctagatagtgagtgggtgtgacatatagagctggattgcccaaacattcagggactaagactcgggattcaataggagcctatgagtgtcttactagcaatccttttcaaacaacccttaatgtaattataaaagccatctagggggaatttaacattagaaccagacacaagtaggcaacctatacaggctacaaatagttatagtacacggatagatgtacaaagagagtaaatgaagttgtattggccggcggcctgaacctgctctaggatgtaacaccgaaagtcgacagtatgagcctcggaatgaaagccatctaggactcactcaaaagggcgtcgtttaatattctgaagtccttggagatatccctcgatcgagtcggacttctccttctcaacccaacccttagtataaactcccctaaaatcaatcaggtatacatcctcattgatatcaataagtatattggccgcctttacatctccctaaatgatattatataaatgaaagtgttgaagtgtgtgtgaaacctgatcaaaccatttttgtcaaagctcggaatatttgggattatatccatcaatacagttgagtgtagctctactacaattgatatataagaagactaatcctatgatatacccattatcatcctagaccagccctcctagttgcgatatgagaattgggggatcgaatttagctatataaatctttgaataagtgagaatctcttataagaatacccgcattaccctaatagactagcttaaagaagctaggccgtggtcgcctataaataaataatttccgaggtattgctggcagtgcagctgagtctacactaattggaacttggacttccctaggatggtagacagaaaaactcgagtagtcgacggaggatggttgcatcctcttggtattactgagataaataggaactaacttctcttccaccacctgcacagtgtagtgaaattcttctgcaaacagatagtcgttaagcgtgtacttttggctcgggtccaggggagcaaattcgtggaagattggcagaaatggccgtaaggcccaatcatgcatttcttcaagagggtcttcaatttccctatcatcatctatctcagcctcatcgggtatccattctggctcttgacgtcgaacgtgtcgaagatgttcggccaggagggtagatgagctttcgaagctggaagcaaagagatcaatttcgaagcgttttttggaaacatagacattcaactgtgtgtctttgtttttggtacttgatctaaatagaccgatttcatagatgggttgctttcgtgttatcgctggcagtcgaggagtgcaaaaaataaaggagatagagagtgcagtttatcgatcaaatcggattggaagctaacagagaactagaagagaaaaaggaacaaagagagatgggaacgaagaagcctttaccctaggcattggtagagtcagctatagacggttatatctaactagccgatgatacctcatatctgcagcaggttggcaattgggtctccgcagcagcctttaccattgccaccctaagccaaaaatcgaccgtatggataaaggcgtattggagctagacccaaggtagaattatcacaggttctcctgttacatctacaactataagatcaagacacagaaatggagcaaatttgacttgattttgctcagactaaatacatgaatgatatctcccaaaagactcccccagataacaggatgagacgacgacaaagtgacaacagctgtaacaaaaggtatatgtaatagtccatgtgatgaatcgatcattgcagaagagggtcctagtgggaagttagttttgcaaaacaaaaaaagagtacaggtcgaacataccctgaagtgcttctggtgattgttggctttttgaacgcgggcaacgtagcggttctcttggcgaagggcacgagtcctctcgcggcgctcggcagtaagagcagcttctttttgttcgtcggtaactccaatcatgcccatgccaccgttggcacgagtgataagagagcggtgatggttggtgcggccgcggggaggttcctcctcgatttctccattcgcaatggcaagctggcgggcagctcgttcggcggctgaggggtatttgtgcaggttttgtcggtaatatttggcaagcgaacgatgaccgacactctttccagatggaaggtggagctcgtagtctgcctcgtaggcacctgaggcgtttcgatatgagtcaagatcgtcctcgtcgacggaggatgcagaactgtcggtttcccagccttcatctccatctccgtgcaccttgacgccaccgctcccggcagtggattcgtcttcatcttcggagtaggtgcttcggaaatcgtagtattggccgatttcaacttgttcttcttcggactcgaaggcaatcatgcagtggctcttgtcgcgcatgtgggtttggatggcttgtgcgtcgttcttcatagcgtgacagtaaagacattcgaagttttcggtgatttttcggtagagataatgcacgaggccatcgagatccgacaaatatttttgttcggggataaacatgccgtgctctatccgcatgtggtccacgttggtgtgaatatcagatgattcagttttgcagaagagacaccgagtcgccaagaactcgtccttcttgatatcactttccatatcctcatcttcttcttcgtcaatggtggcagccttcaggtcctcggtgaccttgctgacgtcatcgcccgatttggtcacgggctcgccgagagagaaagcggaactttgtacggaggcagcatcgccatccttacgtaggctggccgcacgttgcttgtgcttcgagctgttcaagtgattcttgtacgagttttcgctgtagaatgccttattgcaagtgtggcatgtattttcgtacgaagctttggcagcggcctcattggatgtagctttggcggccagaactttctcgttgaaggtttcgagagtgacaggtggcagagaggcgatgcgacgcttcatgttgtataaactatagaaaatcagcttctgaagtcgcaaaaaaaaaaaaaaatcaagacggaaaagagacttactgccagtctttgcgcatgtgatctctctgaacatcgctgcgttggaaggcaacgagacaggtgttgcaagtgtattgcagcgaggctgcgtcttgggtggtcgacgacatatcggtagattttcgagagtcgtgggtggttgtaagggcgggtttcccctttggattgtgggataaatatttgttgcaggcggggtacatatgaaggctctgcctgggcccgatttgaatgattttttgatgatctgagtgtatattgatgatcaaagtagatgaaagtgatgcgatgcaggtggatgtaagagagaagaattttcggagggcaatggtcctgcgagtgattctttatacactcgatagaccgtcatccagagttgctccgccgcttgaaattgtttcttatcgagcgactagccccctctcgaattccactagtcctatactggttagcgtggttaccgtaaacggcttagtagccttcgaaaaggccggcggaactgagtggaccaaggtccgccggattatttaacttccgacagctccgatgccaaaaggggaaatattttgcctgaggcatcacatcttactacgttatcaggtaagctggagcgtcttcaaggtaggtcgcatttattcaacgcgtggcgacgagtaaaccactagcgctcatcctcgcatccagctgctctcacaccctcagaaatgccacactgctaaaaatgacgaggctccgtggaggttccatagacgacccagacatcgcgcaatcccccgggcacgggcgaacgaacacttatcggtcaaagctcccaccaaacgcatcggatgcgctctcacagaatactattgaggtatccgatccctcaagagtgctaccacggtatcgcgatgatcgaagacgaaagttcaacggcttagtgcgccggtgagtgggactccaaacgctgggcctcgcctcctaattccgtatgacactaattgattttgcggaaaaggtacaaagctcaactgcttcacggctgcgatgaccccggatgtcgaacagctacatgtgctagtcatcgccgaagactcagtgaaggtccatatcgtcggtacacagaacttagtgcgaggacgctggcatgctacctcgccagcttggacgacccggagaccggtctatgtctcaatgtgcctaagcctccacctcaattgacagtagaagattaccatcggatgtccctgcgccgaacccgtacacttgaagcacagacggcagcggctaatagatcgccaaaaccggatcagtatgacgaagaccacccgacccgcgatatgtccaggcctgcgcaagatagatcagcagtgtcaaaagtgacagaagggggttcttcgcctcaagtcaacaccggtagcagctatattcgggaccttgaccataccgcggagcaacaactaaaagaccccaagtcctttacacagaatctctttgatacaatctcgctccgtatggtcgaatggcttcctcttcgccgtgctgcggatgcattagagtcaaagtctaaaccccttgcaccgggaactgcgagctatccatctgctgctgagaagcaccactgcgatgccgataaagttccaggcagagatgtgaagattccagcgagttccacgcctgcaaatcagcccatctctcaacctcgtactccttcatcgcgaacgtcggcatcgcaaccccctgcggtcgagctcaagttccagaaccagcatgtcaagcgactgtcaatctccgaggttgaccattggcgccagagtccacgatcaagccttgaagataaaaagaaaccagaatttagcaggaaggtcccggtggcttcttccgatgagtttgtcagcttgccctcaccgccggcgttaaagcaccgtccgcaaaagcaccgcggaagaattggggacgtcgattcggttcctctgaagggacaccgcaaaagtcaacgacgtgtctcctgggacagccagaagctgctcgatgaggtatctcctatcaacaatacgaggagcaaggagctcatgcctcctcctcgccctttcccttctgttaaccaatcccccagtgagcgcaagacaaagcaacctcctgttgaaaattcgttagacaccattcctctggctcagacgatcactcatcttacccccgagattatcgatggtctgtcacgggtcatgattgaatctgcggaagatgctgattgctgggaggaagagcttgatcgtattcagtgcactggcagctttgagcagccggattggtgttttgcaactctgcgtcagcgtgaagtatttccgttcgttgcccaaagtgtatttttcgtgttcagcagccccaatcaaattctgcgctccttcagtagcgagccaacagatatgattgggactactttcagtcgccttgatgtttcccatctgcgtttatcgctgcagcgcctgttcacaatatgcccatgggatattgcactacatagcctatggagctctctggacaagctctttgttcccccgcggggatttacctcttctggacggccatcccgccgatcgtctcgcagttcgaccatgacaggacctgcggcccctccgatcgttccccgacgagtttctgaatctgccagtgaccatcatatgtctgatcctgatgctgcctacattgccacgattgccttgttcactttggtcagcttcgtgcctaagattgacttggggacttggaaagcggtggttcggatgcgtgccgctgggtctgtagcctcgctctcggacatgcgcaagctgccttcgaagaatgcccagcaagctatcgaggtgacggacagattcgagcacgagttaggtcttcgcctcattaatcgcctcgtgcgggctctcactgcacgactggcgtatcatgaaatctccaaggcccgccaagtgtacagcctcgacgtaccaaaacaacgaagactcagcgtattggatcgtgtcattgactatcttagtgagcaatacatctctcacactgctggcagcgatgagcccgctgagtctatcaacccatcctctctcattgttgagtggcttcggactcttttcctgcgtgaatgggacggcaaccccgagatggctcgtagcagcccagccggtggtgccgttcagattctagcctcaatgtacaaggaacgaaaccggttaggtcttttacccgaagacttccatacacctcttctcacggagcggctggacccattggatatgcccgtggcatgggttggaagcctcacaaacaaccgaaccatgcatctgctatcatattctttccttttccctccgtcgtctctcgtgatctacttccgtgctttgaactatgctgccatgaccaagtcctatgaggcggctatgaccaccacgagacatgttacgcagactgcctttggcgccattcaaatttccgatgatcctcgactcctcacctccatgaaaacatccatgtctacttacctcgtcattgttgtccgccgtgacaatattctctccgatgctctgagccaattatggcggcgtgaaaagcgagaactgatgcgacctttgaaggtgcaaatgggcatggatgaaggagaagagggtcttgaccatggtggtgtgcaacaagagttcttccgtttgctaatgggtcaagcctttgacccatcttatggcatgttcacggttgatactcgacaccgcatatcttggtttcaaccttgctcattggaacctctctacaagttcgaacttatcggtctgttgatgtctattgcaatttacaacggcctaaccctccccgtgaatcttcccactgctttctaccgcaaaatgttgggtctgaaggtgaagcatctggaccacatccgagatggatggccggagctaagccaagggctcgactcattattgacatggaaagatggcgatgtcggcgatattttcacaagaacttacgagttcagctttgaagccttcggaagtgtcgagacagtcgacatggaaaaagttcatcgtgatgcagcgtggcctgttgctagcaaagtcaaaatcaccgctccggctcctatagcgggctccagcgcctggatggacgtgccagcttactgcgaccctgcgacattgagatcaccaacctccatggcagtcgaggagaccaccgatgccacaccttgtgagcctgccccagacacggccgtcaagtcagtatctgagtccatatcacttcagtcccctctactccaggatgaagaggccgctcttgtgacgaataaaaatcgaagtcagtttgtcaaggattacatcttctggctcacagacaaatccattcgaccacagtttgaagccttccagaggggcttcaacacatgcctggaccgatcggctctatccatcttctcccccgaagcccttaaaaccgtggttgaaggtattcaatcgattgacgtagacgagctcgagaaacatgcccggtacgagggtggatttggtcctgatcatcgagtcattcgtgacttctgggatattgtccacgaataccccaatgagaagagggcccaattactcgaatttgtcactgctagtgaccgagttcccgtcaacggtatctcaagcattatgtttgtgattcagaaaaatggcgttggagatctggtaagttctgccactttttatagcctacataatatggattgttatactaattgctcttctagcgtcttcctaccagcttgacgtgcttcggacgtttgcttttgccagagtactcttcaaaggagaccttggcaacgaagcttgacaaggctctcgaaaatgctcagggattcggcgttgcataaaaggttgtcagattacattttgcctatacatacccatttgttcgatatttcattgatgtggtgttagcattctatctcatacggtgcaaatagcatagtttcatgaagcacttgtctttacatggacatctcacgaggatttaagatagacaaatcatagtttatagatccccatcgtactccaatgcagggctctggttcgcctgacgatgtggcgctccgcaaatttataccaaatcggacttctgaggtccggcgatgactcttagcattcacatccctaagtgtatctgtttactcttttactcgcacatatctctttacattcggaaattccctttgggccaagtcttctgtataaagtaagacactccgattcgcacgcacaacttacccgctatcaccccccacgtcccgcgataagcgcccatcttcgccttcaatatctgcaactcctgcaagttctaacgtgaaatttaccagcttactccaaatacccgattgaacgtttgatcatggctcccattattcactgcgtccgccacgcccaagtatgtccttatagtgacagtgatcgcaactccctgagcctcgacaactaatgcgcaacatggctcttcactgctcagtcgagctaatagataatcgcagggcctgcacaacgtttgcaccgccaaccacattatccaagaccccgttctcaccgagcttggccacgaacaatgccgaaagctccgcgagagtttcccccgccatgccaatatcgacctggtaaccgcctcgcccctccgtcgcaccatctatactgcgctcgagagctttgcgcccgtctttgaatcaaagccggacttgaagattatcgccctgccagacattcaggagacttcggacgttccgtgtgataccggcagcgacccttctgttctgaaggaggagttcaagacgggggttgatctggatcttgtacaagatgggtggaataacaaggtatgcttctcattttattgcacctcgaaattgccccattattatccaaaacgtggattactcacatttgtcaaaaggcatctggtcgctacgccccaaccaacaaagctctcaaggaacgcgcccgtgcagcccgtcgctggctgaaagcccgcccggagaaggaaattgtcatggttacacacggaggcttcctgcactatttcactgaagactgggaagacagcagccagttccagggtatgtgacgtcaagctacgactgtggagaatcataccgctgacgccgttttccattgttccaggcaccggctggtctaacaccgagtaccgcactttcgctttcagcggggaagcacacacagatgatctggagggatacccgctggacggtgataatgcctcacttgaggagacacttgaatcacggcagcgccggggtaagactggacccatgcctagccgggaggaacagaagacgctgtataagaagggctaccagggttgggatgaccagggattgcagatgagcattgctgatcgggaggcggctaaggccactggaggtgaggaggtcaatggggtccgcatataactgggcagaagaagtgtgttttgatggacattgctatcgtaattttcggttgtcgcagatggcgacgggtaacaaggatagagcgagtacatacatagatctgacatgaaccaaaatggattccttggattccttggatgtccaagactggctctttattccattgtctgttgctttatttgcgttagtccccttgactattgagccccttgggctattttagccctcggtggctgtttcagcaaacaatagaacaaagctgacaagcatgcattatatgcctccattgttgagttctttactcgatctaagtcttctttatcttcggttgtgaacaatgaccttggcctcggaacacgaaacagtctgccatagcctcgacaaggatgccgacaaaggatctgtagaacaactatgaactaagctacccctttgtcttggatatgattgtctatataatggctttctggcccctcgcttttgatcccgtcatcaggagcaatccagcccaggacagagctcaacacctacctgtcttccactactattgcgaaccatccgctgagtaccctttccattcatttttgggatagacactgacaccattatctaggaatatttacataccgagaataccttcttattatatcacaggtgggaggccccccgcaagatgcattgctaacatagaatataacataacagacaaggacaccgaggcattagacgacgagtaccaatccgaacatgcatattacctgtctacggctaagttctttgataacccttatactccccccttggcttcctctactaacgagatccagagattaccgcaccacgggtcgttccagacataccgtcttaaatatcattacacatgcagtaggtcattcccgatgcgcagagacatactaacagaccggattagatcccatacgaaatatttcccccagagggatccaaatagcgactagctgaacggctaagttctttattgcccttcttagaaacatgaattcagtactaacgaagcataggcccgccgatattctttattcaacatcatcacatagctcccatattaaacagctaagtcattcttcgtcctcgtgttactaacccgatttgtatagatacatctcgacgatatatgcacagtatattgtggctagctattagcctagactggggttgattatttgtgccaaatattgcacattgtcttatttatcaagcagctaggtcattcccttgagcccccatgttgactaatttggagtttacacgcagccatatatcactaggccaccgggactagcttgattaattcaacggatgagctgttcacaacgcacctctttaaggagactacctattgttatacttgccaagcagctaagttatcccttctggaccccattacaactaagtggtatcatatagatatcgatgcgggtactcctctcgaccaatctgcaattggtgacggctcgtgccgtgtacgagattagaaaatcgaggcatttcactcttgccaatacccatattttgctgcttagcagcaagtgaccatgagcagactataccatttattaaattactcttgtttctgtctcgctacataatactgtcacctaggaatgaaggaatggatagaaatgggccttttctgattgacatatcctcgctctgatagtagctgatcagctagtacaccacatcgtaaggtaaggtaagatagatacaattatcagtttgataatccaggaaattgtgttccaggatccatggaactttcaacaaacttgtctactgtgccgctccctcgcccacctcacgctgctgggaaagtgcggtctccgccttcgatcccgcggtcaccttagtcaattttccctcgtagtcgaccttgactgccgtcagctccccaagatgggtctgcttcagcaacttgacacgctcctcatgttgctgctcggcgttcaccaaggcgcttctcacagcctcccccatttgctgctgggccagctcgtgggagatgccggaagtcgcctggatctgctggcggtggcagcgtcgtggagagactgaatccggtcagctgtgcaaaccacatagtttcggccttagtctagaaattgaccagtttcggcccaagcgccgcatcgacaattgccacctgcgtaatggcaatgaactgcttacggtcgaccacgattcttcttccgaactccgtatttcttggccggggcccaacgagcggatcagtgctaactttcgtcaaagtttctcacatcaggtgtgaaatcctgccattttcctcaaggtccaatgaaaaaattggatgtaacgccgacgaggtagtgtggggttgtaatgttgcggtgctccagggttggagaccgatagcgcacaagtagagtgatcgaaagatgaagatcactttgaaaagagaggtaaaaagctcgtgaaacttcaacttatagtttattcaggatcaaaaccgataggtagacagatgattttcactataaactaggttagataagtttgagaaatgactcgaatagcctttaccaaggttcttcagctcccgctgggaatctcagcaggcttgacgtagtggtaagctgttgtaaccagccatttaggacgagctggacaagccttctgcctgtgtacggtagaccatcaaccaagtagctatatatcaggcgaagaaagcctcgcggtgtgagacgccagatcgatcttgaacaagagagagtgtattcaaatgaataatggggatggagagagaaagaagaagcaaattggaaattgagaaggaaccagttgatatagctgaccaaaacattgcaaacctcgaaccttctcgctaagctatctagcaaacaatctatctaatggagtaatgcaaacagtaagcgagtaagcaaacatgaagcatctgatagcgatctatcatagatcgtgacacgcgagactaagctcccatgatgagatcgacgtccttgaatttgttagtacactggctagagaaagtcttacttgggttagccatattcctatttcggtatgtatggttccaaccctaagtttaaactgaggttgttgtggggctagcacgtgatcatggctcatcgcgtcagtcacatgactgttcgtattctgggtgatcccgtggtcatgtgatcatacagggtcaccccataccacgtgaccggctgccccaacaatgcatcgccttctaacgcgctttaaatgctggtgccttcaattgacgtacgaatcggccgggggcttctatttttagctgccgatcacccagtcccgtggcgcagacttcacttccatgggcgaactcttgatataactccgcacaaccacctgggtaatctcttgctgcattgtacaccccaaaggacaaaatgatcgatgaaaatttacccagtacgttgtagggactaatttcagcctcgtctcttggtgcagactacgtcatcccctgctagcttcacgattttcatactgaccgcgggacagcgttcttcctcaagaacaactcaaaacaacctcagatcagcacaatatatcatagtcaacatggcaatgaccccgaacctgcttactccttgcacgcgcttgaccccaccgccccaacatcacagaaccgttatggagttgcgctgtacgacccttacgtgacaggcattgtctatggagaggtagctgtagctccagattggactcaaccgagtctgtcggcagacgcaatacgagcaaatggcggcgtagttccgcccccagaacccattctccctaccgattttaccatccagctttacaaccccgaccaagagatcaaagttcaatatcatacaaaatcgtggaacaaaccagcccggtgggaatttgagatgcctcaaaccacattccgagttccttccgcctcagcgctagaccagactcagatcgatccgtctattgctgacattactccgaaattgaggttcagctggcgcaaggatgggaagctgtcgaaggatttgacatgcctcttacacggcaaaacttcaagaattcccgacactcgctcaaagagccgtgagccagatattacggtcgctctatttcaagggctgaaggagctaactctctacgagcccaacctctaccgcgtcgagatggaagatgccaagggtttggaggtcgtgctcctcttagctgccgttgcaattcgagatattttctttgggcctgccaaggaggctttccatatcacccccggtgggctgaacgaaggtcacaagcaagcagcagtgccaacttcaattacagcgacggccacaccagctagtgatcccagactcgatcggaagaacccacaggcccgaccccctgggccaacaatgaatggaaagccatcgccgcctcgactcagcattcccaactcctcatctccggccccacaagagagaaggcgacaggacgaactcgcaaaacaggaagaggagcgacgaacccaggaggttctcgccgcagaaaaaaaggcacggcgtaagcgggaagcagaagtcgagaaggaaaccagacggctgcagcaattatacggacaagaagaagaacaagcacgaaagcaacgacatactcctgccccatcttccaggccctaccccccaccccgacataccggaccccctcaaccttactcgcaccaatactctcaatcctcagtccaacttaactcccagccagtagcccgtccatcccatcatgccaaccaacgatattcccatggcgcacccaccttcgccaacagcccatacctccaagcaccgggccgcatggatccccgagcccaatcatccacccaccttatgcagcgaccacaacaaccacacccgcaaccccggccacagtcgaccgttgcgtttcaccagcttcctaccagtagcggcgctctcctaacagcatcaaggccgacacctcaagtccagccgaggaagagtttctttgggctccgacgcaacaaggaggaaactactaacaagcttgaaaaaaagcggagttctatgttttaatcttgtataccctggcgttttcgtttttcccgcatcatactttgcatctcggcgtggttgtattttgcccatgagtatctcattgtagttgcacagcgattactttcattacaatgcatggcatcttttgctttacaatccattccagacctagtaaattggcgatagagctgttgtaatctcttggtggttcccgaaggacacggcaggcatggaagtccatagcaaagcagaatgcttggacttatttatgtccgtgtgggatatgaccatgtccaccacctataggattatccgagaggaaggagcactgaatgagtagattatctgatctacgtgcaataatcctacaggcaccaaggaagcgtcggaatcaaatggctattctagtttgagtctagcttgagatccgatacacagactggtaaagtagcttggaattatggcctagcaggaatcggttgttgccctcaaggtcttccaccttttggtgcatcgactctccctcgtcagtgagatcggcaattgcttcctttaggcccctcaatcagtgagttcttagtgtcacaagagctctgtactcgaactgcaatgcgtcgtctcgcttttgcaatctcttgccagcccttagggagccgttcctctcttgcataaacttagtggccccatcggtttcgttcgctattgatctctttgatctctcgttgaaggtcgtgggggtggtgggactatggcaattacagccgtaatgtgggtaaagatcgagaggaggacgaaatcttctcttgcgagcttagctgttgtaccggaaatgtagtcgggatattcttgggaacgggggttttcgggttaatcaatcagagccctgtcgactctgacacgaagtctgaagtgaccagatgaggctttggagtatttcctttgtgcataccaatcgccctgagcgtcgggtttctggttcgggggggtgattggtttcagaaagtcgaagaagcttgagactccgacttctagagctgcaattgtttcttcttgcaacctccattattgcaagacggttctgtgttgtagctctccaccagcctttttccggtccattttctgcactcttttggtttcttctaccatccggccgtcgaagtcatcatctgttttcttgctggcctttttttgatgatcggtgtatgcatatcttcaaggagcttctttcctgagccactcccttagcaatgtgtgtttttgtgctagctgtgtcttcttgtgggtagagttctagcccttgctgcaagctttgaatcagcgaatagttcggacattatcactgttgaggtttgacgacgtaggataaagtgagagaaaggtcaaagcaggtaaggaagatatagaataatacatcttgcatcactcaaagtggccatgatggaagagcggtataggcaggtgcttgacgacgtcaagagagctcactgggggaagaggatatatgtagaaaggaagcatcgggggagtgatgagaagagggaagggggtattcataccttaggatatatatacagagcaagggagtctcggaagagagaaggacttaaagagactgcatatttatttgtccctcaggagatgtgaaggggaagaaccgagagagagaagtgggaatatatccgagaggaagaagatctcggggagaaagaatggacagagggtagagtggaaggaggtgtatatttatagccaaacctgagaagagctcggaagataagggtaggaaattaccaggaaagaagtgagttaaggtgatataagtatatcgagttatatagaaagagaaaggctcagaagtaaccagcgatgactaggaggtgtggagggagggagaatatgtatttatacattagtagaagtgaaagaagagaggtcaaacttcaaaggagagaacaaggaaagagaagtactacatactaaggaagagggatttagactcagtagtagatgaagcattttcttagtcgggaagttcccatcttggtacccaatatctaagtgggtatctcgggtggcactactccgtaggtatgggcttattgatgataacctactccgtactattgcggcgagtaattcggtggatcaatggatcaccagttagggcaactgcgtctgatctgccactgtctcggtgtctatagatatgaaatgacgtcatcttcaagaaagccattgctcggcgatcaataaggtccccggtaagtggagctagtcctaactcggcctcttcgctgatccacccgtggcctatggcgggcttactacggagtgtacggagtatgtacggagtgtgtacctgcagtcccctgtagtctgggccgggcgtctggctgattaccggagtaagaactcggtgtaagaaatcattcgctgtcggtcttgcactcgccgaaattcggagctcgggtctatgcggacaagccacaggtgtggccggcaaccaataggagtgacgtgacggggcgcgggagtgccacgttcgcaagccacgtgctgtcaatcatattctcaaactcaattgagaaagagttgccctttcccagaccaataatcgacaatctcttccccatgactctaacagaatacaggaaagcctcacattcccggacgaaagggatcggcgatgcttgcaagaaattatcgttggccccgacggatgagaactagtgagaactgcgccacatttgctcagccattgccgatgtgagctcatgatgccatactccgtccatggtctgacgatgtggttatgtgaagggctggtagaggcctgctacctctcgtggtagtctgtattctggatacagcagataccttgatcatagcaaaactacccgcaggcgaggcttctccgacggagtagttggccgaccatgagtggcagtgccgttgggagagtttaatcgatctgcagggatattgttcgcaatttataaataggggcggaatgttgggaataccctgcagatctatattttctgggagtgagatgctgcaatatcctgtagttctgagcaattctgaaaagggagaagagatcaatttacagagaccaggaataggatgaattgaaagggtcaattgactatccaattgactaaaaatgtactctgtaggtaaaaaaatgatgtatataacatagatccgatcaggacctgaaacggcttttcttccccgcaggcccaacgtcctagggctagcagcctgtcaatttcccctcctcgaatcaactctacttgcttttactcagctgaactaaacccgcgaaaaatgaaacgtaaaccacatcttccatctgcccccgtggtaatatcttgtcattgagaccattgagaccattgagaccatggtgggagttccgcacagtacaggctgtgccctgtgtcgcgagcgacggatcaaggtcaatatccaccaaagtaaggttcaaggtcctgggctaataaggtccatagtgcgacgaggcagttccagaatgcacccagtgtcagaaatatggccggacctgtccgggctacaggcgaacctttcgttttcaagatgaaggccccaaccttgcgcggcgacatcggtccaacacccgacggaaggggagaagcacattggcaggacccgctacgtcttcaactcgaattaaccaattctcttcacacggagacccttctgcgactgcagagatagtacgcggcaatgcgattgccctcatgcgccgacaatcctccttgggtggctgggacgaacaattgctggcgcgcaagtccttccgtgccgcgcagccacaattattcctcgacttcatcagcacgtcgtttccaaccttttattttcataacctgttccggtctggcgacacgcccgggttcgccgaaaatctcgtcatgaattatggccaagacgcgtacctcgactccgccgtttgctgcctgagctccgtctatttagcacacttgactcaagacaaggcactcctcaaaataagtcgacaaatgtactcccagtcgctcagggaggttatgcgagccatcccgaaagccgaccatgcaaactctgacaacatgctctgcacatccatcgtccttagtgtcttcgaaatgttcgcgcagaccgcacccgacgcctgggtcgtgcactcggagggcgcaaagcgactaatgataagtcgaggcccagcagcgcacgagtccgggttcggaagatactgctggatagcattccgcgggttcttcatcgcgacggccgtctaccaaggcgagccctgcttcgtagaccaagaagaatggcaatcctacgcgacgaaagtcaggaccgaagactgccagaagcccggcgaatggtctgcatacggagaagtatccgacttgatcttcatggagatcgccaaatgcccgcggtatatcagcgagacccgggatctcctctcagtcccgtacgaggctgactccacatccatcgcgaacctcatcacgcgcataagtgatacttcgcaacggctgcgctcgctcgccgcggacctccgctcatgtatcagcgcgcacagtgagcgccagcagggtatcgtccagcgacccggatcctttgtgggccccgtagcagagagcttcccggacaccgccccgtcgctgctgctcaatggagcggagaatatgctagagacgctagagcagctctccgaccgtcttggtgaccggttgtgcttcagttctgtcgaggtttattcgcccgagtcgtcggtcgtcacgccgcctagcagtggtagtgaatattctatatccccctattctgcgacgtcgaggagtttcgctcttccctttcgcatccattcagagcttggacagggtctttctaaaagctctgattcacatgatcaccgtgctgtgagttggttggatcgcatcgcgtcgtcgatgggtgtcctcggcgcaaaggtcctcccgggtgatgatccaagtacttcagtgcggatggacagctcacctcaagtgtttgaactgcaatagtcaacgatgatgcttgcgttgacatgaaatgtgatacgaaaagatacctgctcctagccggtctaggatgaacttcccctacacaattacgctctactttatatccccaatgtgaacaatgaaactcaggcattcaattttgatcatatcggcgtatatacgtatagatatatcagatgcaatcgcgttctagtaagaaccactttcttaccactaataatccaaagactgctccagcaagcccctcagctcacctctctcagcctccaactccctactcagagtcggcgcgagcataagcacccgctgctgcggaatagtcccatcaaccaatccctccaaatccgcagccttgaagcctagatccttcaatccacgcggctgatcaccaagcttaacaaggaactccgcaatcgcttcgccaagcacctcacccgcactctcgcgcttaacattcgagatatccacaccaaacgcctcagccgcggcaagatggcgatcagggttcgacgccgcggtaaagcggaagacggcgggcgcggtgacagccaccgaaacaccgtgcgggataatagggtgatccacctgatagcccgcatgtttatagccagggttctggctggaaatggggtagctcataccgtggcagagatggacacctgcatttccgaaccccacgccggcgagcgtagccgcgagcagcatctccgactgtgcttcgtggtcatccgggtcgtggactgcgcgcggtaggtacttgactgttgagcgaagggcggcgagggagaagatgtcggagatggggtttgcgccctggtaggcgggccggttgatggggtttgttgggcgcggtgtgcgctcgttgtatgggattgcggtccaggactcgagggagtgacagaggacatcgaggccggaggcggcgtgcacggctgagggcatggtccgagtgttaagtggatcgcatattccgagggttggcttcagggcccggtgggcaatgcccgttttggctttcttggagacgaggtcgaagatggctgtgcctgttgtctccgagcctgtgccggctgttgttgggacggcgacgagtgggagcaggggcctgtctactggcaggcctttgcccaatggtgcgttgacgaagtcgaggaagtctgcttcagggaagacggtatataggttcatcagctttgcggtatcgattacagagccgccgcctgttttcatgttagtttgtgtaccaggagcctaggggttaagggagacataccgacggccaggaaggcatcaggtttatagggcttagcgaacgcgatagcctctttgatacttaatttgaagactcttagtacctataccacaaccacaactgaagctaggcacattgacttacgagctatccttaggctcagtgcgaactttgtcaaagatagtgaactcaatgccctcacgggtcagaccctcaacagcctgcttcatagcatcaagcttggccacattggaatcagtgacgatgcacacccgcttcgcgccgaggttggtaaagtccattccgacctccttagtcgcgccgggtccgaagcgaatgctagacgccgccatctcgaatgcatattccttctcacgcgaggggtcaatcggcgtggacatgcggcgtttcacatggttgagcagagacgaggtttgcttgtggttgtggtggtggctggggttcttgtggcacgggcagttaggtgggtgggagtattgtactgtgcgtagcaagtttagggcacgattggccgctgagggagcgactctgattgcgggagaaaccattctgtgtaattctgtagaatataatcagaagagagtttgggagaagtcaagctgaagtaaaaggtcaagcgactcggaagagaaagggcaaattggggaaaatgcggggaaatgccccggacttctgcccgagatctttttttttgttttgcgcgctctctcttgactcgctgtttactcgctatttactcctctattcggagaatctattcatatcggtctgatatattctctttggtttctccgttttggagaaactcgaatccagtgcatctatatcccatagccgaggttagttacactcaccgattatgacgtctccaacagtatatatccgtctacggatccacgggtgtgcacaataagaatgagtatgtaatcaaacataaaaagtcagatgattgaattgagcagcactatcgtatactagctctcatatccaccaactataacaatcccccaatctcatacccaaattaaaccctcaacctctcagcaaagcgacaagatcaaatcagtcgaagaatcaacagccctaacctgacttccagcaggcggaaccccatcctcccaagaaatcaacggctcggaaggcttaacattcactgggtaacccgcaaatggatcgccaaagacatcagagagatcataccagactttatcctgtctctggcctcgctcccttgtagaggaaaggttgtacgcaaagatcatctgcggagaactggtatacagcccgtcgcggtcggtgctgatcttgattgcgatgccaccagtgtctgcattctcgcggaaaacctcgctgtactcgtcgttcgggaggagagttcgctccggtaggactgtggaagccacagaccagagatagactgggaacttgcagttgttgtgcactatcgcatggcctaggtttcggtgggtgggtggtggtgtgctgcttggtctcactgagacgaagcttgaggaggggaaggcaccgtaggggatatctctctggccatggttgttgtggattgttgggttcgagagggcgaggctggcgagcgaaaggagggggatgatagttgagaaatacatattgattgattatagagctgttggggtactctttagttatgtcttgcgttagaatcaggaatttggacggctttatatagaatcattcttgttgctgtgtttcaccgcgagcctagttggatctaattcttggcggcaagatgcatataggcagttgctatgaatctaggctcaggggaaattagatgccaagctatgctgtacaccgtagatgtggcgcgaaatgtaggggtgtgaaactaccacaatgtagtagccgaaaagacacatctgtttgtccaacagaaacatatgaagaatgtcaccgtttccccatttagtgcgcatgttgactttgtatccccggagaaagatcggaactcgaggaatgtacaggcctttaattttatattatatgtcgacagggcgagaagaatcaacaaatgggatattctactcatgtctgatcgaagatatggaagaatgtgactggtctactggctccgggtatattaccaaagagaatgagatcaaatccgtatacaaagactatatcgagggattatgctttttcaaggacctttatagtgagttacacccgtggacggcatgacaaactcgcgttaagcaggctgatgcaactatctgaaagtctactcttgatcaaaatagggaatcaaacatcaaaatacaagaccccgtggctagggcaactgtggcgttctagacattcatttctcctgaggaatgtgagctttctataggggagaccacggaaaattcttttgggtttgaaactaccgaggaatgtcagatagaatagacttcagaacaccctgccagagaacacgaattcaaggaacaaaacaaactcagggtagttcatgtggcacgccaaacggtcggtcactcatttgtgatatccccgacgtcatgtccgatgtcccttataagcatcgtgagacagacctaacgttctgtgtagcatacacaaattgatagatgtgacaacatactctgattcaggtcggatgcataggaacatcgctattgggtgtttccgcagccctgtggttcagctagaaagcttaaggaatgacatggctgaatgagatctaaatctaaacaaatatcgacaccctagatgcgtgacaggcttcctgttcttccaattggctgagatcaagacgtgccaagaaaaaaattgtattcaaatatgtgtgacaaaacatctctttagaagaaaaataggtagggcaaggataatttgccatcagaatgaatcgcggacccgcttataacctaagtcatgtggccatgagaccctggtattgtaagccatggttggtggtggttatggagtagtaggcattataggggacatcccggataccgacatactttccgagaccttggtgggaagtggtcgaccggggtcatgctgggtgacgttcttggcggtgcaaatgagagtgttgcaagaagcattctaagtattatggagcatgagtccttgcttgagctgtccggagtgacaaagtcagttggaaatttctgtgaccacagtgaagacttgagtttgaatgatcagcgtaacgatcaagagccgtaggtaaatagcaagatctggaaatcttcctagtgttgagcgttgcgaatcttctcatactcaggcagagcccacttcaccatccattcagattccagaacctgctgagcagatggtctattctccggcctgaaggatagcatcgggcgcgatattgagaaaagagcatctcgttcgttcggttcaaaagaaggcataccctcccttattcgcgcttgctgcacgctcgtttcaaagttatcctcccatgagggatattgggattggggtcggtctactggttctccatccttgagggatttttctcgatgtgctttccacgtttacagccattcgtttggtagcggacccaacatatcgatttgctggcgagtcatatcatcttcgtccgtaaaaaagccttcaaatagcgatctttgggcaatgatctcccagatagtgcatgcaagtgtccagatgtcggacgaaaaggtaagtggcttagttatctcaaagtaagtctccgggggtcggtaatattccattctttccacaccttcaatgggctcatacaagacatggcttgtattcacggttgaatcggtcaatttgaacgtagtgagagaaagtgcacggtgttgaggatgaagatatagcaggctcgcctttttaggaatgagacgatgtgagaaagacgtggacgagtgtaggggcctaaagagcaagcaggactttctcataattttcgtatcgcgatcaaggccatttgatattgaatcgaatttagtgcattttctagcttattcgccttgtctgtccacttggtacgacatacaaaggaggtgaagaggtgatgttgggtctggggtgactttcttccggccctgatcccaataacgtccgtgcgtctggcacggtactcagacacgtctgtctatgtctcgctggacagtaaatactaaaactgatactactacacactatatttcatgtctcatctactagattttcaggctcaaacaaaataattatctcttgacgttgcaacttatttgcccactaaacgcatgcaaaccccaacaactacccctatgatggctccaacaacaagccctacagctatccacacgacgtaatacttgatcactcgtcgcttagagccgctatgccactctgccatcacatccttcatagttacaatgggtcgttttccacggaaatcacgaggctcttgcagatccatggaatgtattggatgtgtgctcgtgtgagcttgctcgggtatcgttggtgccatgatgtcaaggctgtggtaatttggtcttgaccgtaaacctcaatcttattgatagtcaataaatatttttagaggcctcagcaatttgctttcgattgaaactgacatgttttcttcgcgaaatttggtgtcgtctgtttggacgcgtgccggaatcacggaggataagcgatcggaaaagtcccttagaacaaaccccgtaatttgtagcctctagatggaatgaatcacaacttcttagtctaatcatagtcatagatcttgcatctttacgtaccttgctgacttgattcaaacgttgaactacttagaccaacgtgttgcaggagggggttggggggagaagaaattgttagactccgtaatcaccccaatttatgatttatatgctgtagtaattcatgagacccttgaatagctaaacgagttaggcggctaatgctaaattaaccgggacccttgtaaactttaaaaaggatcgacacggcaattggttcgatcgagacgtgggggccgggaagtggatcctctccacagcgggaacccgggtgatgcccaatggaattcatggggccaagtcggttattaaaatgagattttcttcgcctactcataatttgtaacacaccaggcagaaacccctttcaactacgtacttcagagagggtcaaaaaagaatttccatctcctcacttgatatctcatcgccggttacctcgtcgtatcacaaagctacttggctagtggacctataagctaatgtcgcatggtcgactcagtcgggacacagataaccctcgcatatggtcaagccaagattagctgctagtcattttcaatctccgatttactctgagaatatccatttacgcgacgcgaccatggattggttgacaaagttgttcacgggaaaggactcggcgaaaacagaacaaaaagcgcaaaagcggaggagcaaagaacacagccgaagggttcgtgcacaggaaaaggagctccgacgtgggaaggataatggtactgtcaaaaaggcgagctttttctggggatcgccaggtcagacataccagagtaatgttcgtggtccgggtgaaggaatttgaatgggttcggagacaaatctgtgaataaatgaggcgagataaagaagcttcgacttcgtggctgctgaattcgttaatggaaatttctatccgtctgttggacttggctagataatgcctagatgtgtctgatggattcattgacatggacgtagtattattgagaagggaatgagaaatcaacagcggaaattgggactcagtcttggcgtttattggccttaggccgctatatgtatgccttaacatttcccgtgaccacaacaacatcttcccagctcaacctactctatactcttttgagggtgtgatattagattaatatcactcgattttatttctaatggggttagacaaaaccagctatgcttggtgcaaagtcttctaagtgagagacatcgaaatacatggttttgtgggaatgagttgaagctaataaactacagggtttcagaatttgaagcattcatttactcatttcacttgtgctttcctgcctttgagatctgagcctagtatttcaatatgtcgacggtcttaccacatctcgtcggctctgtagacgtccaagcgcatcccctccgtccatgtcaaatttgctgaagaacaacttcgtggtatcatgttcccagtcatgactatgtgaagtgtcgggctagcttggaatttaccgataagcatcacagcgagcggacatgctccactattctgttgtaaatcggcgataacggacaattgttctagctcttgatgatgcaggtactcatctggtggcacccggcgaattcataaccgatgtttgtatcaatcctctgatgaagaagaataacgcctcccgctatcccccgtatcggtcgcctcaagttctgattcctttatcatgcacctcatctcttttgccctcggaatttgggtcgtaactcggaaactgcagctcggatttagaagtattggacttactggccatctggcaatggtcagactgtgtggcaatcggtagacagtctgaaaattccactccaattggctacggagatttcagttgcaatctcgcatttacagactacaagagctccaggtgttcttgtaagggtaacaaatgttacgatcatgagagatcggtgggtctctcttgcctgcgtgggaaggagaacgctccttcctattaggtacatttgtcactttcctttattctcttgtttgttctttcctttccaaggttgtttacactttagctaagcgagacgttcgacttttgcatcgtttgcattagggccaggtatataaacaggctgatccccacttctgcacttacttcttccctctctcttcatcattttgaatcaaccacatcacagcgcaatccatccaacttgcctgccacctgtcgtgtccatcatccatcacatgacttgtttgttcttactatcctttttttcctcataacttacattcatccttcagacaacccagccatatcacaagcatccattcaaggcacctatcatgttcatcatccatcaaacatctcagccacatcatagtgcatcccgtcaacgtgcctagcatctattgagctcatcattcatcacatgacttgtctgttcttactacctcttttttatcgtctacttacattcatccttcaggcatcccaaccacatcgcaagcatccattcatggcatctgtcatgttcttcatctatcaaataactcagccatatcacagtgcatcccttcaacgtgcctgccattatcgtgttcattgtctatcatttgacttgtaagttcttgctgtctcttcttttcatatacttacattcatcctttagataacccaaccatatcgcaaacatcccttcatgacatctgtcgtattcatcatccttcacacaaccaaaccacattctccttccatcttccatcttccactttatgaggtttgtttcttatctgtgttatcgcctattcttcatcttccctcatcgcattctatgacttggttagcacctgatgacacggggctaactgtactagataccacatccactgaatcacatccagccttaccgtgacaggtttcggcttctcgacaatcgtcaggctgcaagaacagcaaacacaaacaaaacaaaaaaaaaaacaaaaacaaaacaaaaagaaaaacaaaagaaaacaaaagaaaacaaacacaaaagaaaataccttggacaatttcaatcaacaacgttcaaacagccacttcaagcatccccttcaagcatccccttcaagcatccccttcaaacaaccatccccttcagcatcaacttcaaacaacattcaatcaagcatccccttcaagcatctccttcaaccaacattcaatcaaccatccacttcaaacaatcacttcaatcaaccatccccttcagcatcaacttcaatcaaccatccccttcagcatcaacttcaatcagccatcaaacaaccatgcacattcaatcaactatccacattcgactactacaatgcttcgaccttaaagaggaggaatgaaaagaaacggtcttggtcgacagagtctccgcaggagtgtctctgaaggagacttctcgtcgggaagaggttacagcgtgtacccatttaaaggagactctcaagaccgtttgctgtggtggtaaaaaaaaaatggtcgcctcgacaagcaagcatcaacattcaaccatccacttcaatcaaccatccaaatccaagcgtctatatccaagttccacttcaaccatctaccttcaagcaaacatccacattcaatcaatcacatctaatcaatcacttccaagcatccacttccaagcatccacttccaaattctactgcagtcaataatccacttcaaccaatcatccaaattccatttcaaccatccaccttcaatcaaccatttcaagtatcctcgctcagccttactgtgacgggcttaggcagcaaacacaaaagcaaaagcaaaaaaagaaaaaaaaaagaaagacaaaagaaaacacgtcgaatcatttcaatcaaccacatccaatcaaccacatccaatcaaccacatccaatcaaccacatccaaccacatccaagaaccacatccaagaaccacatccaagaaccacatccaagaaccacatccaagaaccacatccaagaaccacatccaagaaccacatccaagaaccacatccaagaaccacatcaatcaatcttcaatcaatcttcaatcaagcatccacacttattcaaccacttgcactgagaaatgataatctaaaattctacacgtctccaacctagagctttttccaagctgatataatccctggttatacatagaaaagctgtttgcacggtttatgctctttaccaccttcgtatattgtcgagtattctagctataacaccgagaaggtctaaaaatagatatctaatagcgtagactcccaccagaggacctggggaactgcgcgtatggtggatgaacctgtagagcgagcagagactgatattctatttctagataaattcatcaaaagaatagacgtgaataccttagtgactggtcaaggcatgttagagacaaagaaacagtgttctgctcatattcttctcctcaaacatggcatgcgtgtttcagatatttctttgacctatgaatcggtctttggccttgataccaaagacgaacgcacaacaaagaccatctcgtctagttcgaatccccataaacgccacctccggttctccgcaaacacaggcactctgctcatcgagaggacctccagtcttcaggacaatacaaaatgacctagcaagaaatatgcttaaaaccaaggtgacatcgacatccaaagatgttgcgcagtcctacccctgtatagtcaacgaccttggaccatatactatgtagtggcgtcgcaaattactttttaggaattgaatcagccaaataagacaaggatagagataatttatgtgctgacgtgaattgcaaattacataactccttccatcttcttcatctctttttgtgatgccttgcatttcgtctctttcctcgacatctctcagtcgcaaactccccacccaattcgactcttgtttactctccacaccactccccagtaacacacgaattgacatgaatacagcccacgatggctaccgatcaaatttccaagcctaccgagcccgatgccctgatcctcgaagcttggggccagggtctgatggttggaagtctactcattatggccgctatcactcttgccaatatgaggtcgcatattctcctgcacaagctgatcttcgccgaggtacggtggaagcgaaaagactaactctgtaagttatgttctcaacaggacttggctgattatcggatcgataatagcttgtcctagctatggctcatggtactttcatcttccccaacgagccggtctacggctggtatctatctgtgaccgcggtcggtctcaacatctcctgggctctgcataatgttatcgcctggatgaagaatcgtccattcctgtcgcgaaaggtctcaatcatctacattaccactgttgttctctgttggccttattggggtctagagatctatgccaacttcacatacttcaacaatatcaacaaggtcttcttgaagaccagaccaatggagccattatttcggttggtcatttcaattcctcgcaaatatcgaatgcagctgcttcataactgagtcctccactctaacatgatctaccaacagcgatccgtggtggatcttcacaacagccagtctattctggactatcaagcgcgaatacaacttcggaatatgggagctaatagtagtcagcccccgcttcggactcatgctggtagccatgtgtctgtcgattattttcataatcgttgatacctgcagcgtgttgaaagtcttctccagcatactcccaacaggcgtcgagccgttctggaaagtaagatcccatcgtccgatcttcctttgtcacaccaccctaaccatcccagctatcttttatcttcaaatgtctctgcgacacggtcatcctcgacgacttcaagactgccctcgataacttgcgcgttcactggatgcgcaagaagaacagccagttgttcggtagcccgctgtccaccccgacctctactccagactctagccctcgtgcggatagaatacgcagggatattgagacttgcgattcacctacgacccctacaacccctacccctacgaagagaccttacacccgtgcggtggatgttcctgcgcggagggtgcgtgacgatgaggttgttttctattagccggacccttcggcttcaaattgtgcgttgagaatggtgttcggggcttttagtctggtttcttgacctcggcggttctgaggttgttacgacatacccggacggatagactgaagttattgcgattttacatcgatttgcctgaggagagcgatttatttcaaaagaaaaaaaaaaggagaagcctcggggtcagatagttaatgaaacatacaaatcgtctgcttttctattagtagacattctgccataggtgagatctgcaatacataaaccggagaattgattcggagaattagcatgtcttcatgcagtgtcacatctataagttcttttcctggtctgactagttaccaattatgaccaatgataaacggtgcttacgctttagcgtactctatttatccgagaatgtctctgcttaaaggttggatggaggttgtatacacatcattgaccacttatatctggtattttatctggattggagaacaagctggcaatgcagaaatttacacactcgaggatagtacatcccacgcatcactcggagaattgacggattcagatgacacgacatcccacgcatcctcaatactacaattcggactcgagtctcgaatataaatatagccatttcgcccgtataatacccagactccaatctcttactccatactccatccaatatcccctttgcaacttaacatccaagtaataatggactccctcaacattccacagacccaaacagtcgctctcgtccgttcactgggtgggcaagtcgaattcaaaacagactaccccgtgccaatcccgggacacaacgaagtcctcgccaaagtgctctacactggcgtctgccagagtggtatgtatagtgtcatgtaacccgaccgacatctaacgggatgttctctcaacaagaccttcctaacaaaccaacagatctacacaccaaatccggtaccgcggcaggaccagacggcaacccgataacaaatatcaagctgccacacgtgggcggccacgaaggcatcggccgagtggtcgcgcttggaccggatatcacgcacgccgcgggtctgaaagttggcgggctggtcgggatcaggttcgcgagccgcatctgtcggcggtgcgagttctgtcttgcgggtacggagcagtactgcgttgagagtacaaaccatcttcaccacgaggatggctctttccagcagtacatcgctctcgatgcggattacttgacgattctgcctgatgatgttgatccgaaggtcatgggaccggtgctttgtgcgggtttgacggcttataaggtgggttggggattttgctttcgtggtctggggttaatttgtggttgattaggccgtcttgaacgcgaatgttcgtcctgggaattggttagtggtcgttggagctggaggtggccttgggcatttggctggtatgtgttcttttttgtggtactctggagatacgttgcaatccactgacattctccagttcaatatgcaagagctcaaggggccttggtaattggcgtcgacactggtcctggtaaggaagactttgtcaaaggtctcggcgcgcaggaatttatcgactttgccaccgaagaccctgtaaagagggtgcaacagattactgggttgggtgcacatgctgctgtggtgacagcaggtaatgcaaaggcgtttgcatatgcctgtgatatgctccgggttggcggtactttgagttgtgttggtattcccccgggaagaccgagcttggagactcctatctgcacgattgtgatcaagggcctcaagatcacgggtaatctggtgggatcgctgaaggaatgtatggaggctgttgatatggtacggcgtggtattgttaaacctgtggtcaaagtccgaccgttccaggatttgcctgaggtatatgaggagatgaggaagggtgatatttcagggcgcatcgttcttcaaattgcagaatgatcccgcgaaaactttattgaaattcagattatctgagaattctgttgttgaagccaatccaaaaaatccgatgtcaagttcctttcatcgggctcgctgtttggtgtgtatcctggaatctgagcctgaccaccaggtccattttcgcccgagtgaaggccagaatcttcctccccgattgtcaacaggcgagctggagctgcaactagagcttcagcggttttagcacgaaggattgacttcaacatggtatcctgctcgagaaagggatcaatcttctggtataatgcatgcaaaaagtcctgtggtcctagttcaagccgagaacttattttgtgtgaagacaaaagaaccgtatccgccagggagttggcaacttcaaagcacttcaataactgtaacgagccattagccatggcttgtgtttctgtatatcaaggctactagcctggtctcgtcccaatggtagcaaatccgtctcgctgaaaccccgcaaggcctggagtaaggcgcggccaacttgcgctggaaatccaaatgccaagacgggttcgcacgctgaagaagatagcaagttcatgttgagtgcctcctgccagagaatagtcctcatccactcccgtgtaatgtggtagtctgccgttcgggtcgagacatgattggccatgctgaagcatagtgaggcaaccttgacctcggtgttggtcagatgtgtagccatgatgatcccaggacgcgagttgcgccgtactgagatctggtcaaacgcaataaagagcttgacgagttctagcaacccttgggcatgaacatcagcattcatatccccctccaaatgtatcaatacaggggggtcaatataagacggagagagacccaggtgcaatgaataacctctgtgatagttagtaatttactctgcgaaattgaattctctagcctacctctccgatacccaaagcagcggaaataccaaggcctggtttgaaatcacctcatcttcctcgtgtaaaatatcctcattcaatcgcagaatacgagctccggtcatggcctcctggatgaacatcattgacgaatttcgttggttgaccttggcgtggtacacatgcaaaaagaaagacaccagaacgcttctgagatccagatttgctccatggctgtcgcaacttgtacgcattcgcaagcaagcctgggccattagcgtgctatctactttctgagatccatataccgagggatcaagatgcaactgagccatcgtcgcggcacagagggccatgatgagacaggaagtgttcccagcattggagtcaactttctctgggtatatatcctctactcttctcaaaagagcttctgcgttgactacaggccagacgctgtatgaatattgctggtacagacggatcaccgacgcaaagactgtctttgggatgcaatggaggctgcaggctgtggcggatgaagagatggtatcattgctaccgttttgtatgtatgtatcttcttcaacattctgctgaatctctgtggattgaatctccggaaggtcggtctctcgatggcatactctgcgagatttcgggcccctcctgtgggcaggcctcaggtacgtacagcgcacccgctttgctgcaccgcggcaggtatcgcagggccatgaaccgctgcatttcactttgcgggagatacagatatcgcaggctcgtttgggtggcataaggagctggatttggaagtgtcatgaagaaagatgtcaccttgccaagcgtccaaaccatatgtacaatgcggggaaacattggatcttttcggcacctttgccggtatctgctctcggaattagtttttattatggcctagtggtaaaataccagttcataggtgggctcggccacccctgagcccacctgccttctggtaaattacgctgcacggatttcgtcagggtcttttatgttggagaggttacgtgacggcgtattgggagcgctaaacccaaaatggcaagactgacctgatacagtaattcacaggtccgtcgtttagttacaaagtagaaatagcctttgctcccccgaattaccctctgtcctcaaacttttcttcatttacacacatactccgtacctaagtaccaaatcaaacctccaaccacatcaatcatggctctttccgcacccagcacagacgtgagtctcccatgctatgctcccaacaagccccagaccgaaacctaatcaagaaacagccgcaagtcctcatcacccaagaatcaagcgcggaacaaatcttccacagcttcacagcagaaaccgcttggcagcttggaaatgcactaagggaccgaatcctccgcctcccggacggacagcgccagccggccctgatctccattacgctcaccggcggagccccgcaccatgtggtgtttcaggctgtgaccgagagcggcacgatcccggacaatgagaactgggtgcgacggaagcgcaatactgtgctccggtggggtctttcgagctggactatgagacagaagactgttagtgggcttgcggctaatgcgtccgccgaccagattgaggctgcttttgtgaagaaatatgccgttccaagtgctactgggggtgctgttgcagatgagtatgctatccatggaggtggctacccgattcgcgtgcgtggcgttgatggcgttattggtgtcgttgtcgttagtgggctgaagcaggaggatgaccatcaggttgtggctgagactattcaggcgttcgtggctcagcaagcaaaatagatgtcgaggtatgccggtacacgatatatttcaatcaaataaatttatataagcctgttaataggcactatctataataaaagaatgcgaggtatcatttgtattgtattcttagccggcattaatcaaccaggcctgaaagttggagacagtgccccgtgtaaattcgaacacaaaaaggggactcaagcaaaagaaaaaaagtggaactccatgaataatgcctcaaagataattttacagttcgtcgtggtcaaggggctcgtcatcctcatcaggaggagaagcagagccgtacagcttgctggtgatggggtaagccacactggaaagctgctccttctgctcctcaaagtcctccatggtagcggtggcagcgttgtcctcgagccagtcgttgacttccttaacggcgtcgaggatggactgcttgtcatcctcatcgatctggccacccagaccgttctcatcgttgacctggttcttcaggctgaaggcatagttctcaaggctgttacgggcctcgatcttgcccttgatggccttatcctcctcggcatactgctcggcctcctggaccatgcggtcgatctcctcctgggagagacgacccttgtcgttggtgatagtgatagactcggccttgccggtgcccttgtcggaagcgctgaccttgaggattccattggcatcgaggtcgaaggcgacctcgatctgaggaacaccacgcggcgcgggggggatgttggtaagctcgaacttgccgagcatgttgttatccttggtcatcgagcgctcaccctcgaacacctggatcaagacagtgggctggttatcggcggcagtcgagaagatctgcgacttgcgggtaggaatgacagtgttgcggggaatgagcttggtcatgacaccgccagtggtctcaataccgagagtgagggggttgacatccatgagaacaacatcgaccatggagtcatcgccggaaagaataccaccctggacggcggcaccgaaggcaacggcctcatcggggttgattcccttgctggccttcttaccagcgaagaactcctcgagaagagcctggaccttaggaatacgggtagaaccaccaacaagaacgatgtcatcaacctcggacttcttaaccttggcatccttcagaacctgctcaacaggcttgagggtcttcttgaacagatcaacgttaagctcctcgaacttagcgcgggtaagagtctcagagaaatcctcgccgttgtggaaggcctcaatttcaatgcgagtggacatctgggaagacagagtacgcttggccttctcaacctcgcgcttcagcttacccatagccttaagatccttcttgacatcggtgttgttcttcttgttgtactgcttgacgaagtactccatgacacggtggtcgaaatcctcaccaccaaggtgagtgtcaccagcggtagcgagaacctcgaaaacgccgttgtcaatagaaagaagagacacatcgaaggtaccaccaccaagatcgtaaacaatgacctggcgctcatcaccggtcttatcaagaccgtaggcgatagcggcggcggtgggctcgttgacaacacgaaggacgttgagaccggcaatggtaccggcatccttggtggcctgacgctgggcgtcgctgaagtatgcggggacggtaacaacggcgtgggtgacagtcttacccaagaagctctcggcgatctccttcatcttgccgaggatcatggcggaaatctcctcaggggtgaaggtcttggggacctggttgacgtcgaccttgacttggggcttgccatccttcttgacgaccttgaaggggtagttcttgatatccttctgaatatccttgtcgtcaaacttgcgaccaatcatacgcctgcaattcgttagtgctgggttcttgctgtgacaggtgtaatggaagcttacttaatatcgaagatggtgcgctcggggttggcggcgtattgattcttggcggcgtcaccaacgaggcgctcctcatcggtgaaagcaacgtaagacggggtaatacggtttccttggtcgttgacaagaatctcgaccttgccattctgcatcacaccaacacaactacactcaaagttagcaacctgtcacattgaacatgaacaatttccagactgaggcaacatacgagtaggtggttcccaaatcaataccaataacactgccgtagctctcaggggagttctcctcctgggcgttggcggtgtttccaaagaaggccaaaggcgcaacgagcacaaagagaagatagaagatggtggtccaagcgaaaggcttagacgcgccatcgcgtgcggataggcgagccattgtgagaggtgtatgtataggtatgtggatcgagatttttcaacacaaagacaaagaagctgttgctatgaaagctccgcgcgtgccgctctaaacagctgcgcagacgagtaaacacaaggcgtgtttgactctatgaacccttatgttagtcgatggtatgtgggaaagggacccagggcgaagtgagggaatggtagaatggttaggagaagaatcgaagaaagaggacttcttgtacgcggatacggcccagcggccatgctggccttttcccagttcaggtcacttctcgtgctctgattggctggctggcgtccggcagtggctgactcagaaactgccacatagacacaccgccttctttaataggccctgaactgcctaaaatagtctagtggcaggggtctatccacgaactgctcagggtttccaccaatcaacgactgccagatgatcgaacttgctagaaggggccaaaggtttgccccttcgggagttctagtcactgctactgaccacgtgttactttatggttctatgctacattacaacagcctaattgtgtgtcgatcaattgatgataacaagtggcatctcaatggagagaccaggtgaggtatgtcgtatccccgtactgcgggcctagatttgggccggggatctcccgagtaggtgggcgtggcacaaagcacccaccatgccctgggtatagagctttccgagtctaactctaatggcactaccagtgatacacaatcgaataattactcaatgattgagcttaaatctttctatagtagtatccgaaatcgtattcaagacataatcaccagctggcgagctctaaatcgaatattattctgtgatatatatattttttcagtgtcttactctagatgaacaataatgtgccaccgacgacgagaaattgtggcatatcacgaataagatggatttcgattaactcaacttattccaataaaccagcagccactgttgagcctcccgcgcgcaggacaatcctggtcggtgcttctagaggaacagcttgatccatttcaaccacaacacgcgccacgacacccggtcccacaatcttagggcgtttcttgatagctgctcctgacgctttgtccagagaggcgaccagcttgctgatgcggcccggtacatgtagacggccacggtggacatccacttgcatgggcatcaggtgttcgaaggccagaaccttggcggtgaaagaagtgatggtaggaatgggagaggagggacggcagacaacgtcaccggaacggaggtgaatagggtcgatattggcgatgtttaaaacgacgttttgacctgccacggcccagtcacttggttcgctgtccacctccaaactgcgcactgttgctgtttcaccactaggcatgatcaggatatggtcgcccatctgcaaactaccggcatcaatacggccagagatggaaagcggactttgcacgccacctcggaagacatcaccaatcgtcatacgcaaaggcttttcgagggcgtgtgtgtatggctccgacgtttccagctcttcgatcaatgtgcgacctgtgtaccaggatgcatgagggtcgtcagtccggcgagaaatgttgtctcccagagaccctgagcacggcacaaatgaaatgttgctgtcttggaagcccgcagttgtcaagaacgcggagatctgctgttcaatctcctcgaatcgttcatgatcccattgcacggtatccatcttgttcacggccaccacaatcttttgaacgcccatactgcgcaccaacagagcgtgttccttagtctgacccttcaaccccgactcaaaattgcctacactggaatcgatgaccagaacagcgaagtctgcctgactggcaccagcgatcatgttcgggacaaagtcacggtgacctggtgcatccacaatggtaaaggctgtcttatcagtctcaaactggttggtggcgatatctattgtcacgcctcgtgctctctcctcagacccttggtccatgacccaggctagcgcgaatgagcccttgccgatcttctcggcctctcgccgatacctatctagtgtccgttggtcgatagcaccttgatctgctaacaaccgtcccatgagagtgctctttccggcatcaacatgacctatattggatatgagtcagtccagggcctcaccttgttgccagtggagatcgacttaccaataaccacaaagtttgcggaccgcttgcgggtggacttcttatactctgatataacatcaagattcttgctcttgactgtcactttatcctccactgagagatccttcatgccacctgccagatcagactggcctttcttcaccgctgccgatttcgatgcggctgatttcgatttcatacctacatattattaggcaaatgcctttaaaccttcctgcggatcgccaaacctttcgctgtgttctgtgcattgagaacgacatcgtcggggctgggcgctgcaaagtcaaaaggttcagcatgatcctgtccatagatcctcaacaggtctgaactgttggagtgtaagtggctgggctcagctgctgtcgggcccgttgctgcgccaacgatagtgctggcaaatgttgagggtgaggctcgaatagtaggcagtgtttgctgggatactggttcctctttcgcttcaagcacctcccgttgcgttgattccgaagccttagacaccgatggccttctgttctcggaatcgggctgcttcgatatagaatgcggtgagcttggggttgcgacatgacggagagatccagggccctctgaagcttttggtgtcgacctcccgctagctgcaagtctgtcacgaagggagcgcgatacacccgaatgatcaagcgaggacgtcttaggttgttcaggtttaggagttgacgaagtcgaagtctccggtggggatggtgttttctcggcctctttcttcttccgggctgcagctagggcggccaatttggaaagttttccaccattttccggtgcgcctcccaagagccccaaacgtggaaaaagcggctcaatcaggatatccgattttcgatgagagggaacattgagccagggacaatcgcgaaagaaatcggcagccgaaaagtgtgctgtagaaggaggagcagggtatgctggcactggaagacctgttagaacattgttcaagcttctatggtattagtttcgagtctctatatatcacatggaatgtatttgcaccagatacatacagtttcattcgcaaggaatagcagcactcctgatcgggacgcgcagaatatcttgtgccccaaagcccgagcccagcgacgacactttaggataacaattaccccatgaacactgcttacctgattgaatcttcgatttctgcagcttcgtagcctccttctctctctttcctgcatgcagaacttcggttagctaaatttgacaacaaacaatcgaacccagagacccgtgataggtaatatgatgtgatatgcagtatctgcgcaaattgaacatacctctcaaatagttgaccgatttctcaatatcattgtagtagtgccataatgcgtcttggacttctcctttcgtggcggtcactgagggttgcccggcaccgagctgttgcaaaacagcggctgtacactgttgcaagaactcctgttcctctgggtcagcgggtgcatcctcgtcatagaaatcgtcatcgtcgtaatcgatatccttaatacggtgtcgcgacattgcggcgtaaggaggtggggtaataaatgaggggtttgtaagtgacgaagatggtcaattgagttgagttgaccgccttccgcacggttgctgagtttattgggtttatatagcactactgtaccgccttcttatacgggcataccacccgttgttttccaactcccgacttggtaggaaattaaactgccggcagaacatgggctacgtcatgtcatcatccatggatccatgccttcaattggctctcatttctaatctgaagacaacatagctttgacatatacattgtaacattaatgtcgaatgcttcaggtccagcttagtctatccttgggctagaatctttaattacaatacatattcaactgtccagcttcttatacaccctttcattcggtacttttctttagaaatgcaatatctgtaagatcaatagtgtcatcttttatccgaatagcttcataaaactaaagcatagcagcggtatcatgtggcagacctttactctatggctgagggcgggtgtgtagctagtaatttgaaagtgtgtgtatagtaagtctcgtatatccttgtagtctaaaaaagctacattatagttacctacgtatccatacgctgagtttgtcatagttatctaactttcgcgacacgcaggaagccgaaagagtcaaaacagagtgaaaaaaaagtaataatgttcatctatcgaagtggactgccaaaaaagtcacccgtaccaggcccagaaaagctcccattactcggggtcaaggcaatggatcgccggaaagcctggcgtggggtggtaggggcactgggggatccagtgatgggaacggccgatgttgtggtgactgggaccacggaccgtgtgtcaggagtgctaggagtgttgcgaccgctgtcattctgcatggtgacagcggtgccaggtcgagagagaacggcgacagtgcctccattcttaggaggtgggcggaatcctagcttcgagccttcgcggaagatctcttcaagcatttgcgagacaatacctgcatcctcgtattcctggaattttttccagagacgtaaagccatgcgagcatcctcgatcgaatcatgaccttgtacggtttcgggtgagggttcctcttgtatatgctccttgaagacagcccaggccaggtacctgagactgagacgccggttcttcccggggtggaagaagaggtactgtgtgtccacggtttgtgccttgggcacttgaatgttgattttgcggaaatcagaagctagaccgtgaccaacaaatatacagccgaggttgagaagcagccaaagcttcttgtaagcaaccttgagtgggacaagattgtgttcactggttcgcggatccaagtcaccaggcttgatgccggaatattgggtcacatagtccacaattggctcacggatggtaatatagtcatcaatgaaggggactccttcatgaacacccacaccgcgcaagacggaaacacgggccagcccgctcttgttggggcgtaccatttcctgtgatccgtctgctttgacgtcaatctcggctttttctagatcaacaaactcggtatccaatgcgacaggtgtcccgggctttggcatttcgtcctcagtgagagtttgacacgattcaaccggacggccgccactagaacaagacgactgttagtatttctattttcaagcttattaatgtgcaaaaacttacttcaaagaccactcgcggaatagcagcgttttgtcgagaaggttcttccaagagtcatctacgacatggcgtgggtctctcacttggtaagccagcacgcaaggttgtttccaaggctgcgtaaatcggagcgcttcatctctctcgacctccgtgactaaaaagtcattgaacaggtgccatttgccttgttcttcagactcagcacccgaaatggaaacattgacgaaagacaccaaatgggccttttgatgttccgggatgtcaatttctgcaactaagccaatcagatcatatactgcgagcccgggtgtttgattttggattcggaggcgaagatcatcaccctcaaagcacatcacctgtccactagcatcaacgagaattccaacggcgtcgggcaaccaccctgggattgcccaaagccgacggccgannnnnnnnnnnnnnnnnnnnnnnnnnnnnnnnnnnnnnnnnnnnnnnnnnnnnnnnnnnnnnnnnnnnnnnnnnnnnnnnnnnnnnnnnnnnnnnnnnnnnnnnnnnnnnnnnnnnnnnnnnnnnnnnnnnnnnnnnnnnnnnnnnggtggcccgaggggcgacggcagagagggttggtcagagcggcattgaggacgagaatcaaaggcatacggtggatggtcttgcgaatggtcacttgctggtagcgacgacaataattgcaccatcctcggttttgtgtctctcgctcgatacttgcacgtaggatattggagaagcggaaaagcggattccgtcgtgcgtgtttcatgtcgatattcgggtaaatcagttcattggcgagtgaatttccagggcgcacaatttcgttctggcagaacatgcatcgaatagactcggacgcaatggtggctaagcgctgatcgagctcctcagaattaggctgaatcatccggaagtcttgagctatttgagtcaagaaaaagcgattgacagcttggatcgcagttgagagagatttgttggtaaggttctcttccaagaggcccagatttgaggcttctcggaaactgctgaatgtcttgagaaggttggtagcctgacaattctgcccgcttgccttctcaagcatgtcgaacaaatagcccagttcacacaagagacagtgttcaaaaatgcacgatccagctgcatgattcaaagcgagatttcgaaaaagtgggatgaatttgaaaagctggagaagagaattagtaaaagagttggcgatgtgagtctcaagtccggagaatgaggttttgttgtagaacctgtagcaaaggtgagcgaagggcagcaaatgaataagggaaggacatacctgaaatcaaagtcatcgacaccgaatcggctgtatttgatctctacgttgctgtatttgagtaatggatcgtcatcgctctctccgttgatcttcgcccctgctaatgcctctgcagtatcgctaaccaagccatccgacttgctataatctcgagccttctcactcagaaactttggggcaataagagctggctctgccatggtcaatgcacgagtgttttctatttggtatcgacgagtctttctcgggtttggagcatgatgtcccatctctgcggggcgtaaatatggcaacatggactgatccagcggagccgccggactgccaacctcaaaaagcaaatggcttggccacgccgaaaagagacgttcgtggtaataaggcatcccaactatgttcaacggagattcggaagaccactctacttgaggaggccgggtgggaacctcggcaaattccgtctccttgctcaattcattgaaatgaaccttagtcggtgagccccataggtgaatggagcattcggcatcgttaatagccaatgcttctcctgatggtgacaggtcaataccgagcacaagtgacacattggcttgtctcaagttgaccgaattgggattcatgagatctatcacttggagttgacctgtttgggaagccacgaagctcgtggtgtgaagtttgggatgcatgcgtacgtatgctgctccagcatggaacggaatgggaggcagcggtgtcaaggttttcaagtcataaacgttggccagaggatccacgattggggacccgagatggcggaccgagaagccacaggtgaccagaaggtcattccgcgcatccatgtcattaacacctgttccatgagctttccatgacttgacaacgctgaagtctgagagactgagagcattgactgatccggtatctgttgcagcacaaagataccgactctttttcataattgtgtagccgtgctcggtgggcagcttctcgacaattgtgcccttgtcaatgtctaccgtgaacatcacgcgctgagaacctgcaacaaggattcgattggtctgggcggtgaaactcatacagcggaggtcgaccatctcatcgtgggtaaggtgccactgcgtcaagccccgtcgagtaatcatgtgcacactctttgaggacaacgaaatcacacctcgttcgtgaaatattatctgctgtactgcaccttcagaaactggatgggctcgaacagaggtataacgttgcaattctggtccataaaaggaagagaccctgccctagcgaatcgaacacaatcatcagcatcccgcctcggaaatcggcccgacatcaacactcacatattcattgcctgtccataaaagttccatcatatcgtcaaatgccgtcgctgttgccacagtgggcatggcatggggactcggcggcggcattggaatacgcgacagctcatcccagtcggcctccatgcttacggttgcctctgcggtccaaccccagtaccgtaattatattgtgtgttcggtcttgttactctcggtatgccggtctgatgggcctggtgtaaactgctgtctttacccacgtgggaacacggcgagtgtgggcatcgttcggcgcgagggacgcgattgcggggaagctatcagacgattcggcggtggggttttgacacggtgagaggtttagagttaaaagggcattacacttgacaattgaggatcggctcgaaatgcctgacacgatgaacaaggaacaatcggactccaactactgtgtatgttgccggcgaagaacaggaacggtgagattggtttaatcacgtgatgaccgacaagattacaagtcaacacgagagcgaagatcagctagttagagcaatgattacatgcgaagaagtagtttttttatttcttccaagaacagaagcatgggaatagagccatcagttagctctcattggaagagaagtgggttatatgtatcgaatcctgaagcaaacaactggcccaaaatcaccaacaaagaaccacatccagtatcgtataacacaaggggggtttcttgaattagaatgtcacgaagggaatagaccacgagataaactcctctcgatgcgctctatggaccgttaaacactttctcaatctccaaccagtcgatgtagtcaaccccggtcagtggtaatgtcggattatggaaactagaataaatcccttctgcttccccggaaagatctagattccagtctccctgcatatcaaacattgcgtctgggacatccatgttagaccatggctcgagtaaactgatttcatcttgatggtcaccccggccacctgaggctacagtcatgtatggtggaggatctgaggaagccaacaaggcatcttgtcttgggcctagacttattgtatatgtctgggtcgtgtctcgggtagctgcatcgctgtgcgaggtatttgcatcgaagacatgattcggccaaacgtgcgaataagattgtgcaatatcctgcaggcgtcgctcggcagctagattgccagactttgatagaaatcgaagtacattagatgcttgatcaagcgctggcggtggttgactctgtgatttgtccaaaaatcccaccatgaccagaacaaatgcagcggagaatgttgcgtccagatcaaaaaagccataccgggcttgtgtttatgtcagctcttgatttgaataactaaacataaactgggggatgtagggtctgttaggttagagcactggaaggactcacggatggtttgctggagacgaagtgattcaagtattgcgagacttctggtggctgcctcgtcacacgtatcacagagacgcagcagcatactcggcgccggttcagtagatcgcgactgctgttggctctgagcttcaaaccgagctctttgaagtaatattggccgtgtgcataggatgatggcctaataacgaatcaggaacaataccaataatattttctgttggtgatcgtcccacctgaaacagcattaggtacaatgatgcacctgtgcgagttaccgattgtaaaggtcgattgaagtccaacaccaaagatttagggaatgatcggcctgtgtcatgcagttcttggagaattccctggatcttttggaccaattccagttgggtgattgacttatttccatatagagctgttgtaggtgtattagcatgatgccaatagcacaacggtgtatatcctacttgacattatatcatcagtgacacgcgcaatacggacattgatggcaagggcaactggcgactggaaccccatcgcgttccgcgggagttcagttcgtagctgtcgttcatcggctcctgcagccagcccgagacctgaagagaggcgcctagaagtgtaagttgagtgccaagcccctaaagttgccaaagggcctacctgtcgagcatgtacactgtccaccagagtcttaatctgtgggcactttgagaagggaggcagcgttggtcgacttcccgcagattgcacccaagagcaatagcaagccgcagtgcgagtccaatctaccacacgtcaatgatactgtgcaagagcattgtggatcttacacaacgtacatagagatatgcatcatgtttatggtcacaccactgaagatatgtagcaatcagtgtcagtatctcgacggcgacaacaccttccccacccatatgatgcaacggaggaagacgcttcaacgcttcagcgaacaagtccgttcccggtgtctgtgatgtgggatgttttacatccatgagctttgccatggccatgaccaaaagatattctgtaaaccaaggagagttgatctgctgttgtcttgtctccgggctctgaaatagcaacataagatcgtccgagaaagatcgtgggtcaaagaaatgctggctcacgccaagatagaaaaggaattgatcaagcaagtgctgtgattcttccaaagacgggaaagctactccagcaacattgtcaacgagctctttgaccgacgcccactgaggtaaccgatcagcccgatattgaaaatttgaagtagatccatggaagctgcggtcactagaatgcgacctgtcaagaagcgatctaacctgagactcgaatgcaggcccggaggtcaggtccgttgcttcgtgtagagtcagttcatatttgcaagcagaccaggacgaagaaagcgatgtcaagttacccggacttatagaaggatcgttgtcggtatataataactcagtttgcctctgactggaagaacttcgttgcgcagattgacggcctggggtctcatctggtactactgaagaatgaaatgaagagaccggagcccctacagtttgagagctcagctgctcttcataggttcgtactttttccaagagatgtttcacttggctatttgccaatcagcaagactagccagatcatacgacgcatatgaacgtacgcttcagaaaaccgtctgcggccggaatgaccgaaagtgcattcccagttgtgtttgatacaagcacgacaaggtttatcaccggaacattttactttgcgttttcggcatgtttcgcatctgtccggttgttatcatacatgatcccccgcagccggagatgcagacgcattacacacttacgcgttggtagatcgtgggctggagcccgccatgatttgcaaagaagaccgcgtatagctgattttgatattgatttgatagccacatttcagtcacaagtgcgaggacgtgaacgtatggatcgggggttcaaccgaggctgcggggacatcggcctagttctccgagggcacccgccatcgaagataatcaaacatttccacctgggcatggttggataatgcaatcaggatgaggatgaattgatatctgcgtccgaagtccagtcttcccccgcgaaaaataagaggactgcctccgccgctatcttggagtcgtcatcatcatctttgccaggcacaacagagcgcctgatattttctaaatgcgaggcaagcaagtccgcaggccagtgaaattgatttgcaaattgatgacagagctcagcagtggcgaatgcatcgaattcaaaatgaccttgtaatgtgagaacgtggccgggcttgtagaggccgtggattggacagttacggctgcttccgatgttgagccatggttcaggcagcatcatcccgggaactagtgtgtcttctggtgaagatatcacggcatcaccgtggatgatctgaatgcggaatggctgttctggagtaaaccgagctagaggcgggacgttggagacgaaagctggattcaagatgatagggtgcatgccaatttcgtggccactagatgaacgttcgaccgatatcttaaatgaggatccttggggcttgtagcttttgtcacttgcgaggagagcttgagctataagttgatgtccaaagcaagatccgaaaatcctcaccataggatagtcgacatacaccttctcaatgaaagattgcaagcctagaatccagtgcaacttgtcatataatgctgctgcagcttcagtgaccaggatcgcatcgacaggatctggaaagccactgggtgcattttccgtcgacgaccaagggctgactcgtaaggactcgagatttggaaatgaccaaccaacaacgtcgaacgcagtgattctcacacctaaagatcttcggtgctggtggtattcgcttgcattgatacgatttgcggcggcagtgagaagaagtttgaattgtgagctgtacagtcctcgcttagcgtagacagggtagcaaggaatgtcagtgtcaaggacagcaatatgtataggacggacagacatgttgatcaaagcaaccagtgaaagacaacgaagaggagagagaatgttcagattaggcaaacgaacaactttccatttgtcattttgtcggataagatccgaagatgtcgggacagatggccgatctatcgaatagcatgttgttttaactaaagctctttatgatagcctttgaaattctttgattggattgaaacgctttagatgtagtagtatataatcgacgatgacagtaggttactctatacaattgagattcacacggccttaagaataccgtgagggttcgtttctttctttctttctcctcccttgttttcagtcacgcaaaacatttaaatccgcttcatactttcaatcaacgcatcgcgtgtgtcaggagtacgagtggtctctcgtatatccgcgccgagtatcatgcctgcctcttgattgcgagattcattacctgaagtctcaaatgtcttgttcgtaacgaactcatcagtgagatcatagcctgagatactaggctttgaagggtagatttgtgcaagtattcccctgcagatggccataatctttttgcctctaccttctcagcggtatcaccgagttttaggcgctttgcattcaggtaagaaatcagaaaacggaaatagacgtagctccaacacggccgtttatctgagaggattttcaacgggcggagatcaacgtgctataacactatgaccctatacccttcaattgttggtctggtcatttttgttacgagccaattcgattcagaagaaaagagtgcaattcaaaccaagttctaagtacgaagaagaaaggaaaaagagaaactatcagtgtgcgcgttcttcccttcttataccctcgcgtttgtctcgcttagttcccgtttgtcaatttgggaaggtacgaggacgtggttcctgcctcgtttggcaagtacgatctcaagtacgacccttcctggatcgtcacaattttgacttgagagagagttttcgacacaaagaggctggatcagctttgagtcaacagacgtgaggtgaaaaagtctgaaatcgtaagctgcaagatcaaaggataactataaccttagaaggtacctatataggtatgggtccgaagcctaatttggcttaatggcattgtggagaggaactttcttcccagtgagcaggagcatatatacaaaacatgtaatcccaatgttatgaaccgtcagtatgctcccagcgttagatccttaactgccttggattgtgtaaaggtctaagtcgcaatatgtgtgaaactattccccccagcatggcatataatgttggcactataataccgccttccaaatctgtccacaaaccacctcttccgccaacttaacaccgccttaaccccgatatcttcgctttctcacgcctattcacggctactggcgtctacttttgcttcgggatatccatagtccgtgatcgtcaccaacctttgcttgctgctgcctcaagccactagggaagtataaatacctggtcctcccccccaacttgctgtcttttttctttcttctccatcctagtgcaagggcttgacgcgtatcagtgaggagacatccgagatcgtgtttttgctagttgaaaactaccaacttgactgcttcaagtgagccttcgggctcgcttgggaatttttgaaacatgcttacctcaactccttgactcttgagtcctcgagttaaatcctttgaatgtgatgccatgatgggtatttgactctgtcctgagtgtgcgatcacatgccatcaggttgagatctttgttttgtttatcttcgcgtaggggattgtgtttgtatagatcgttaccataactaccggtttacttcacatattacttccttccttccctctatagtatgatgaattgaatactcttctttgaacacctgcctcagaacatgatgatctaataatctattcccatgtagtagttactaggctgcacactctataccataaccctgctatcatttgtctttcttatacaaacaaagcatgaacccacttgctttgatatctgtttacccacgagtttggtcttccctttcatcaacctcgggcaaatgaagcctagaatatccctctatttattatttgtacctgatttacctccatcacttccccgataatcagcaagaaaaactacatctacacacaagcatagtcatccatctctcaaccccaaaccatgactccaagcaatccacctcagcccaaaaagtccgctgtcaagcgaggacggcctgcaacaggctttgataaaaaccacgagtttctactgcactgccttactcaatcaggtgtccgagtcagtcatggatattcagtcccctatctctaatctctggctagcttttgctcagtttgttgcaggtcgactacgctgccgttgcaaaatgtgtgggcatctcggagagacaggcccaacgccatttttattggttgaagacgaaaatcgctagctatgggaatgctactctcacacaggctgagaagcagggtcaggggcagaatgatggccaggatggccaggatgggaacgacagctagcggctgtttctcacgtcttcgtcttgtccccctcccttagtattttcgatcattctcgccttactctcaaaggaaacagcttcgtgtgcaatcgaggatcgactagagtctgtcattgactgccacgacttagaatccacacaataaatgcacgttgttcatctttcaatttccgcattacagccctagcgtacggaaacacaagaggtcataatcctgtatgtactaagacactgttgacgacatatttaaaccgttggctagatacatgacaggaagacctccagcaaagggataacgaaacgaataatactgcctgaaatgccacactacacacccaacattaaacacagccaaggcgctcatcctattaaccgaatgagggtcctcgtgattaactatcaattaccgataaaaggaagcgggattcgagcctggtccaccctgtggctggtatgcctgatactcgcccgtgcttgcggcgggaggtggtgggctgtaggaggtatactgtggctgcgatgcaccaggtaccggcggaggctggtgcgatggaggaggttggtgggcaccgggagagctgggatacggggcttgttgctgttgttgctggaactggtgtgcgatttggggcatgctggcggcaggcgggccctgaggtgcctcatcggtggagtaggccgaaggtgagtagtcttgctgttggtgctgctggtgctggaattgctggtggccagcaggtggggcttgaccagcttgggggtacgaaatgcgctcaacaggtgaatcatagacagaggtccccaattcttgggggtgatcgtatgtagattgcggacggtggctgacaggttgataggggtcgccgtggggtggctgctgcgatgcgccggcctgagactggttgcgaggatctggggagtgagaggctgggcggtacggcatctgctcgctagtagggtatggtgcatatgcatttgccggggctggtgtggtgtctggccaagtcaagttagaactaggtgcccgtccgtatttctagattatactgaccttgaggccgaggggtgaaatatcgaggatctgcctgaggagtaggatacccagcaggcgcggcactaggataaccgtactgtggctgggcaggtcgtccatattgaggctgcgccggatgggctagcgatgcctcaaggagggactcatagtcgcgacgagccttgatgaacttttcattgagctgggtgaattcatctaaacacacgtaagccggaaatccacggtgtaacaaacgactggctgattacctttcttttgcgaatattttccaatcaattcgatgagttttggccgaatggcaagcgtagcttgatagagtgtagtaatctcttcgttctcttggacattgagatctgtattgcgggtgcttagtagagtcaggagcttctcaacactcttgatctggccaaagacgtccgcctccatttgagcctcccgctgcaactcatcgacagtggggtctgggagtttctccacatagttgagagggaaaattccggtctggcctctcagagaacccttccaccaatccttgtaaacagactccaggactgcaatggtatcgcccttgcggaattgaagctctcctggctcggacggttggaagtcgaacagcgctctcacacgcgacacggtcgctaccgatgtgcctgagagagcaggttgagtctcggcgggctccccttgggttgtggcagctgatgccgatgcaacagcagcagaaggagcctcagctcgaggtgctgccgcagaagcagccgccggtgttgctttatccttaatcgagagggccaaagccatctgcaattcctcctcctccatctgacgatcgacgtcggtgatctcacgctttccaggtttcgacggtggctgcagattcgggtctgtaatataatcagtcgcgtccggagtataggacgtagaaagatacttacttgtggtttttaatttcatgtatgcctgttccatgatgccaaaatccgggttggatgagaacatctcagtccattcttccatgcgctctagaatcttagacttgacttgttgatgcgtattctagacaaataagtggttaacacttgccatttgggaaaaaaacaaaggtttcatatatgcttacacgatcgttcgccaagcggagtagcgcatcagtgaagctcctcgaagccaactcgcgatgaatcttcagcccgcagttttgcgacaacgcatttgcaagctaggaaccagtcagctatagccataaacgagagagttttcgcgctccaaggagcacagtatccggccacgaacctccaatgtatagagctggacgttggcattccggtgagccagtcttttgatcatcgcagccacggcctctttcgcactatatcgcaacaatcagcaacgggtcgctagacgagactgagattcagagctagccacgtaccctgattcctctgcaccaactttgtcacagacatcctaaaccacaaaccccgaatcagttatgtcacaaggccggaaatgctatatggcatcatgcaacccaccagaatgaattcccagttctcggaggtcaaattctcgtccgtcgccttggctatacagagacaaatatcgtcagtaaaacacatcacacaggcagatccagcgtgtccccaggagcttttctccaagctagccagctccaggggtgcatggtgtatctgacgaagcagagaactggtgcaacttaccgacggcctcatcgaagtggttctgctgcgcgcgaaacatcgcgaatgtatctcctctaatcgtcgcaggcagtcaccgggtggtatgtgggttgtcggagaagtcgggcagcactcttcagcttctgacaagcggcttgccttgttttcacgtcgcggaagttcagcgacaggttccaattagacttgagtagctaagatcacgctcgcttgcgaaccgcggttgtgtagcccgtagcgatggtccagcttcgaatgcggggagtcgacgacaggaaaggatgcggctgggctgccggttgatgcaggtgtaaatatcacagagacagggttttggcagggatgggtatagcaagcgactggtattgcagcgctgggcatctgttaatcgggtccttggggatgatcagggacagtgttgggggtacctagttattgtgtacgggcggaactcgtcacctgagtcagcatatgacgatggagacctgcggaactgctaacttctaagttattattagcttggactgcctggattcttctatattgtgtctgcctggtcaagcttctaatttctccttcttttctgcttcttttctactccttttctgatcttttttctcacgctagttagaacttcgacatatcaatgtaggctgctacgtttcttcccacattggtttatcggctgtggctgaacatatctccactacggagtacctacggagtactttaggcacagactccctagaaatgacggagttcgaagctcattagctacttactttcaccataagctaacgacaacagaatgcgcaaatagaactacaagaaattacatagaggccaagatcaaatacagagacagtgagcggtaaagcagatatcacaggcaacgtgctcatggatggagtcattttcatcgacaatcgatgtgaagaataataaaggagtctgggtacataaaatggattccagcgacgtactgtagtgtaggtcgggatctagaagaaaaatcgggagtgacggggtatctgagcaagacgtcaagagatatcaagtacgacaaaattaaaccgaaacataggaaaaaaacaaatggggtcgttcatcagcatcctcttcaagcgcctcctttttgggctttctcttgagcgcggctgatacgagcagccttaaccaagggggcgagatgcgagagtggtgcgcagagagacatgaatgggtgctaaaaagcgaagtgtcagttatctctgcgagagcaatggaaaagaggaacgagtaagtaccttcagtaggtcatgcgccgacgcccgcttctccgggtcaaccttcagggcaaagtgaaggaattcgcggaataccggggatagattgtgctcatctttgatggtgggcgttccgttcgtagcaatcagatagagtgctcgcagcggggattctgtcaggtacggcggctcgccctcgatcatctcgatggccatgatgcctaaactccagatgtcgaccttacggccatactctttgcgagtgacaacttcgggggccatccagtacggggtaccgaccatggtattccgcttattctgcgagtcgttgatttgagcacagaaaccgaaatcggctggagattgttagcatgatttcgacacaacgacagggcgaaacttactcagcttgatgttaccatccattgccaatagaatgttgtcagatttgatatctcgatgaatgacacctttagaatgcaaatgctggaggccgctcagagtctagtcgaaatagtcagcatcccagtttcatcttgatacaagataaccattctgtactcacctctcggcaaacagctgcgatctgtccctcgctcataatgttgaaggtaaccacgtctgtcaaactgccaccttccatgtattccatcacaacccaaagatccagcccatgcaagaagctctctaaaaagttcacgatgttcttatgcttgctatctttcatgaccaagatttcgttaataatcaggtccttcttgggttgcaggtctagattcatctgcttgatagcaacgcagttgttgttaggatactcatacgctgtgtacacaccacctgaagcaccttggccgattttgttgaagttgtggtagatctgggtgggatcggcagggttgcagattagcatcaagcgtgcccgaatatccatggcgctgctctgtcgttgctggcgctgtctaggtctagcagcaggtggagcgcgcgcggtaggggacaccccagacgaaagatctggcgccggagcagtggttgatgcggaggcagctggaggctgctgtgcttgctggcgttgggtgcgattccgttccaaagtctgctgggccgcggccatgacttgctcctgttgccgctggtattgtgtaggggatgcgatgacattggggacgttggggacgctggccgtaggggtgccatttcgggaactggagcggctgcgatggggcgatgatggcaatggctcggattccgggatagtcggagtgccaaatgtaggagcgtggttctccggagcagttcgctgcggggatgtgtacgaatttgagatcgggggttgaggaggagggcgggagggggtcatcccggtaggcggtttcgggggagcacgatgcggcaccataccgctcagtggaggagatatgacaggcatgcctgccggaggtccgcgaggaattggcggaggcgatcgcggattctcgaaactgctttcgtgattttgcgggaatcgtggacttcctggtggcgatgtttgttctcgtgggctggtggcttgcgcagcttgagcagcttgcgcattgtcgaacttgtgccagacttcatcatcgctgtcgccacgggtgttcttctcgtagaatcgcatgatatccatcatagtctgcgggtgctcctcctgctccttcttcgagataccgttctcctgtagtagtcgctgccattctttgggcagaccggtgaattggccggtctgattgtcgtagccgacgtgggtaacgtggaccggattctctggagccgaaattttcatattgcgaccggggcttcccagcatactgtccacgaatctggagaagctggcctttttgctctgtctcgttcggggagccggaggattgccatcgtcggaatgctgcttgccggggttcgggggcctttcggtctcgcgatgagcgaaggaatccattcgttgcgtcagagtggtgaagctcgctgactggcgcagtgagtggcgtccgcggttatcggggctggtgtggttcgagcgcagtgcgggcttttgctgggagtgaggatcggtctcgacgctattctcatccaatgcactaagcatgccccgcgtttcgtgagggccgttcaattcatccgaactctgctcgttgtaggaaaaccggtgggaacttcgggtgcgagaccgggaggtcagattggagaagaagccacctgattcgtcgttggaaggcgatgggccgccactgttctgatccagagacgacgaggaggaacctgggaattgagcgttggattgcgatcgattatgctcgcgactaccgctgggagaggaacgtggataaacgggggcggagggggtacgtttcaacgatgtggcactctgatggctccgaagaatgcgcgaactgaagctagggggatccttgtggagtttgctagaagttcgacggaatttcaatgggaaattgtcctgattcatggtgggcggatttctgtctctacacgagacagattgaaattgggccgaggaggggtcagatgcagttgttttatttttctggaccaaccaagttcacggacctgaggggaatttatggtccgcggagaataaccgggtccccgaaggttcttgacgatggatggaatggaagattggaagggaagtctgaagagaggaggtttagcacgtggagtgggaaaaggagtcgggggtggctgggcggtttgacaggttgaagggtatagggagatctaacaacatctaaagtcgactctatcagaccgagtcagagacacttacagtcctcatttaggatgttataagaatagaacgaccatagagtctcagatttctacggagtaccccgtttattattccttacacttaacggcttctatacagatccactatctttaaataactaaatattaattgtacctttctggacctccccaatacaccacggagtactagctctccagcaaacagaccagaagtacctatcactccccttttgcccctggcaggtagccgaatacgtcctaaaagggttcaaccgccccgggttggacgggtcaagtgtgacagatgcaagccaatatcactcggcacattggaatccctgggcattgggcatccttagccctagaagaacaaaagcacagtcgcacagatccctcctgagcaattaattacaacagacggccattgtaaccgatttgctgagccaccggcttcgggccatttttcttccatatgcgccaccgttggttaccttcgatatctcgtttgcacctcacacgttgggcaaacactaggttgattagagtccgtttacacgggttctactatcctcctccatttccccattccatttgactcggatcggtatataccactttccatgatgtggctttagcgttccccatattagtttcagatattaccggtggtgagatcgaatgagacgtggtccgggctctaagggcctttttcaactggccaacttccatgcgaagattgaccattatctaaacatcctcttcacctcactgtcgttggtccagtcaagcggggtctgagatttggcctaaaaccggaccgtacggtattgacagaggctgatcgcatgactttcatggagctttctgcgcattctcatctcactttaataggttgactttgatatctgccctcgggaattacaaaaaaaaattagagatccacagtaacatatatggccacgcaagctagccccataggagcatatatttatagcgagcaatatcaggaaagattgttcaccattatcattctttgattcatacaaatagtatcgggaattcaggtctacaatatatcagcaaaaacatggtctatttggttaacaaaggttgtcgatccaataatctctctaaacacttccccactatcttcaccactttcaatcagctctgtatactccaatatctgcgaccgtcattcaccccctaaacggatggaaatagtgatatgaaagagttgtgtgaatgggcccgacgtactaactcctcattgcggaaatcaggtcatagtgcaaagggaaggaggcggaaacatgcctgttccgttttgaaatggtcccgacatacagattcactacagaggcgcgcaggaacaagtccactgtcgttcatggttattctcatgtgcgtagaagaacagccttcgaatttcggggttaagattcaccgtccggtttagagctgtaaatagtagaaccgctgggatgtaccctcttcatggggcacactagcaaacatctagtatctggcaaacgcctcctgatcatataagacatctagatcaggcgaataaagcagtcttgcagtacagcagccgtgttaaggtctgcatcggtaaatagcggtgcaggtagaaaatggtaaatcaggagtgtagctgggtagtactcaatagcatacgcttgatcggagggttttctaaatcactgatagagtagggaacaattggcgagggtaagaataccttgcctgccctagtatgtgattcaactctagaaatgtggtttgtatgtttgacgttagctgaagtgaagtctagcttttcaaggatagtagatatatcacagatatttacttgtactcaatctccttacgtggtatactatgtaaacatggttatcatagtacagtctctgtaaatctcctcggatatgactcgaaaatcagaaggctgtaaagatttctcacgtagcgaccactcgagccttcctcttgtttacttcaactattcttctcacacacttctcccctccacctttcttcacttcagtttactcttctatcaagctacagcctctgtatcacacacagtctagtttacacttcatctgtttgggctctagactcttaacgatttcagcgacacccagcgtggcgacttgtctttttgggcagtctcttgtctggcttgtcacgcatctgctgcaatacttgagttcacatttttttttcacttgcgtaagtctatttttttcactggtcttttcatctgaatcctaacttctcttcattacgtttattgaccatcgcattatccaggtactttcctttcctataaaacacagcattatggagggaattacatccgaggctgccacattcagctatttgttcttgtccggtgatgaaacatgtaaggcaacggacctcgctgcatttcttcctcggtggcttagcgaggtcaatgagaataggctgattcccccgggtatcccagagctactaactcatcttttactcccatttggaacacgtgatatcctggaacacatcgcgaagctccgaatccctgactctttgaccgatgtacagaagtggatggtaaaacttcaagtccttgtggataacaaagcacacgaaaggctgctgcagaagttggaatctatcccggatcaaatgatatcattcgaagatatctgtggacaatctaacagtaaggacattgtttgatccgaacctctggaaatgatattgacatacgaaaactcaagcagctaggacgaatgataacctcgccgttgaccctaggcgcaacctccggtttgaccatgacatacgagatgtgatgattcggggcgacaaagacgaaatgagacagtatcaagacgtcttttacgggactggctccgttgcctggatggttcgatctccttactggaatatcgccttggccactgacgatgaaggtattcgacttctcccggataatgtcttggacagagtccttcccaaatggagacaaattctcaccggggagacgatcccgaccccgaaatatggcgttatcgattcttttcgcgcgtggttggctagtgaggagaaaaaggccagtgatctcggcaaaccttggcccaaaacccccgtcattcccgtctcttcagccccgaagcccaagtttgtaagtcccaagactccggatcgatctcgccttcgcgccatgaattcgagtcgtttctctccatttgaatctagccccaatgcccccaacaatgagcaaactgaattgctccgagacatactcacggaacttaaagacttgaaaaatatgattagccaaaatatcggaaggaagcaagagtgcgagattgcaggaaaccaaccgtatggatcttggcaacagagcttccatcccattccttccatgcctcaaggaatgcaaccaaattatctcgtgccgcaacaaagtccattcgtcggtgctcaatatctacctccccttcctcacccggagtgggaacgctggaactcccagtaccaaggcccggctaccatgcccgacccgggacctggttcagcttctcatccctaagcctgcccataaccaaggaaggggagacattcatgtacgatttgatgtggggctctttgaccccaatcactacagagagagttgaaagtgaggatgagacggtacgtagatgagcagctgttgctatgttttatgttggacattgaggactacacctcctcgctgtatcatgtcagattcacaagtatgcgtgtctgttaggttcaatcaatcgaactcaacttcagtctattgctggtcgtatgggactgatcccccccgcttttagtgaagagagttgaccatctgcacagtgacgaatccgcatgacaaccaactctttagcttctttcaatctcaaatatcagtggagctaggctgatcttacgcacagatccttctcagatgattggcttaatatcgtccgcagtcggtccacatgggtgcagatcatcccggagtaaacaaagatcaaatcacgcaagttagtgggatatgatgtatcccaaattttatttcgctgaagatatcaatgaacagaaggtgaaatggaaattgcaaaatcaacttcactaaaattcactagtgtcaagggtaggtgctctctcccttgctgatgagaatgtggaaccacgcacttgcgaataacacgtcccgttcctgccgagagacctttagcttctagaccttgagggcggaagatcatcggtgtaactcatgtgggggatatgcagaagattcaatggagtctaaacgcaacgtgtattgactgtgccttccacaatgcgagacatcacatagattcagacaaaatccagagttagttacagtaagcagatgctgtaagcatcaaggtagctcttttgcagagaccactttttattttgatgatctaccgatcagtaattagcgcatccctttgggcgccgactccagttagactggactcaataccgacatgcgccttacatcgcccagataagatgtacaggggttaacagtcggtgattggattagctgtcaatatgcgaaatgggcatacttcgggacctaacctgggggagctgcgaatggtgtagaccggatcaacataaattggacgtgattcctccttcccagggtgatttttattcacagcccgattcccccttctgtctatacatcatgtttggtctcattccgctgctatttgctgcactcgccagcgcataccctaacaggggcccttgcacaggcgactgttgggctcatgacccagccatgatccagcgtgtgtcggatgggaaatactaccgcttttcgacgggcaccggtgtcagcattcatagctcgccgtccgtgaagggtccatggacggaccttggctcggcgttgccagatgggtctaagattaccctcgatggtgtggacagcaagaatatctgggtaagaatgacctgaaaacgcaactgggaacaatatcaaggccaatggctaacatgattcaccttataggcccctgatgtccactaccagaacgaccagtactacatgtactatgtcctgtcacagatcggcacccagaactcacagatcggtgtcgcaacatccaagaccatggatccagggagctggacagaccatggctccgttggtctccctgcaaacgacaactacaaccgtatcgatcccgcctggatcagcatcggcggcaagaactatatgaactttggttccttctggggcgatatcttccaggtccagatggacactcctctgcaagttggcggcgcaactccctatcaaatctcgtggaacgctactctcaaccaccgcgaggagggttcatacgagttcaagcacggcgactactactacctgctctactctgctggtattgcgggcaagtacacaaagacattcccagctgagggtgccgagtaccacattcgtgtttgccgatccaagaccggtcttggtgactttgtatgtttcccgtctttgttcattcgtcaagacacgttctaacatttgagttacaggttgatgcagatggaaagtcctgcaaggagactggaggcaccatgctcctcgcaagccacggccaggtatttggacccggcggccctggtgttgtcaatgacaaggacctcggtgtggtcatgtactaccactactacccccttgccaccaagcagagcaccgatgtctccgacaacgcgaactataggtacgcctggaacgttctcggctggaaggacggatggcctttcgtcaaggccacttaatgcacatacttttcgtggggagcccgcggggctgatacatatctttttacattcttctcttgtcgatgattgggctcatatacttttggggggtattgacttgtttattcgatacccataccttcttgatatctgtcatgatgcacttcctctgtgtctggcaactcttaattatataatattggtcctattcttattcatatgggtcaatttcggcattgcccgacccacatgaagcattctacaaggacataatttacctatgcgctgagacaagtctataaattctcgctacatttggatctactctaaactactagcctaagcgactaacttggaaaacctgtttgaagacctgcatgcttagccccggtgcttccaccccattttctacaagaaagtgaacacaaacttgttcgattttggttcaagctttccttccttgagcggttgaatcaacatgtctattgcagcccttcctgtagacgcaatggtcgcaatctgtgatcatctagaactgtcatattattttgcactaagacttacctgccgagcaacatacaataacacaatagagatatctgcaaggcggtgctacaccagtatctctttgcttctcacgagtgacagtctctgtcggctagaagagatcgctgctgatgatattcttcgaacattcgttcagacaatttggattgtgccagccctattcgaaggcaaggagaaaatgacagattcccgcttcgcgcattccaagtttgggaatggggcagggaagggttggaaggggaatgcggctgagctccaggctcgctatatcgcatttcaggctatagaagaggaccaccgcgccatatcaaagtcctctgccctcagagataccctagatagatgcctgccacggtttgaaaatgcggtcgtctttggtctgcagtcttatccgatggaacgtctcctcaatctagaaaaaggaagctatattcgttgcctcggcctacccgaattgaggaatcaactgagttgcactgggagaccgtcaacgtggttcgatggatgttacctaccagtaatgggcaatgcgcatgcctttgctttttccgctcttgtggaaacaattatcaactccaaccgagaagttctcgcactacacacatgtcgcggatattactgtggaatgacaatgcgaaaccttcaactgacggagtcacaatacaaactcttgctacccctcctacgggaattagaatgccttcatatgtgtctccgtctcccgaggaaacaagaggatctcgataaaagtggcttctgtttccttcttgatatccttgttgctgtagcaccaacgcttaagacgctggtgttttctcaatggcacccaaaatatgaactgaacccacgatactttgaagaattatcccggggtctccacttctcgcagctccaggatcttagccttcagtcgattgaagtcacagtcaatactctcaaggcgtttctacagagcgcggctgcgactttacggcgaatgactctgaagtcagtagggttaagagatccaatcacctcagcgccagatctaggacctatggaccgagaaagtcgaatagtaaacccgagacagaaatctccgcttgttataatgccgagacggcgactgtttcatttgatacctggatccaacagcgtcgactagagatgtcgacatggtgcccattcgatttaccggggacgaattatggtaagtcatccagctatgactagaagcttctgttaacctttgacaagaaccgagagttgggtcagatggattggctgagaaaccagttggcttcgcatgtttccctagacgcgacaaatctcgaaaataagtctaaaattattatatatgacatgtagttcaatgccgttgaatatcacgatccccatataaatgtagccacagtgacgtgcatcatcaattggccacttgccgccacgtgcgaaatccaatcctgggatataaaatctaaatctaaagttacgaagtgattgattcacctgggcatttgagattgcttatacaatgcttgattggatttcggatggcgttataacacgtatccgaatgagagcgaagaacagctaagctattattgttgtatctcaaattcacctgcgcaaatccaagatcaataactattcattatcaattcctaaagaaaagagcccaaggcgtgaaaaggtgcaaaagtgtaggcgcgggctcggagaaaacatccccggagattcgagctggccttttcctgtactttctggattgtccggggttctcgacctttctctcacctctcacctccacctccacctctcacctcctcttcttctctcacctctcttcctcttttctttcaggtggctcctctcttgagcccctgtatctttcttttttgattctccgcgcttcgtcggtccaaattgctattgcattttcctgaattgcatccgcatctcctgaaaagaaaccctatatatcctactcaattacgaaagaaaaggatatacttttgcctgtaagttattcccaagtccttgtcatgccattgattgcacccggggtttacggtgatctgtcctgatctgtcttgatccatcgttattgcatactgacccggcccgtcttgattgcagcatttcgtgcatagcccatttatcaaccttgtctccaaccccgatttactccgtcaacccccattactcctaatggctcttgaaacacctaccactgccaacggcggatccctcgctgccatgttggaacagcagcacgcccgcgacgagttgcacaagcccactgtggaggaaattgtggacgaggaggacctcaaacaccaccctccgacctcactggagcccctcctcgtcgatgccgacacacctgagcctacccccctcgccaaaaccgcttccccggtgcctgcacccaagcccgctaccaaaaaggccccgacattcgatgttcaatccgaagaattgttcccggctttgggcagcggtccgaagcctgctgcccccgccgccgctacatggggtgcgaagaaaccttctgcggcctctgctgtcgcaaatggcttgcccgcgaagtcaatgggtacgtggattattttggaccttccggattggactttttttgacaaatgaacagagatcccccgtgtcatggcccttcccggaaagcacatggagcaactccgcctagcaccctcccagatgcaaccccgtggccagatgaagaagcctcttcgtgatatcctccgggatatctcccgcaggtcaaaggccaatgttgatatgcgtggtggccctggtggctccatcattttcgaaggaaagggctccgtagatgcggtgcgccaggctctccgcgaggtggcccagcaggttggatctaaggtatgtgtcttagacgtgccggaaacgagtgtctaggctgaccaattcgtcctaacagcaatccgtccgtgttcccattcccacatctgcacgcgctcacatcattggccgtcaaggtaccgttgtgcaggatatccagactcgcaccggtgcccgtgttcaggtcccccgtgccgaccccaacgctgccggtgccgacgacgatgatgatgataccattgatattttgattgagggagatgccgtggccgcggagatggcccgccgcgagatcgaggcgattgtcaaggagcgcggctccaacatgagcttccgattgaagactgtccctcctgaattcttccccttcattgcaggtgcacatgacgccaacgtgcgggccattgaagagcgcacaaaagcgcagatcaacgttccgcgctatgatacctggtcaagtcagccccctcctcaggaagccaaccctggccaggttcagtttgtgcctgtgcctgataagcacattttgatttccggagaacgggctgccgcacaggaggctcgtgctgagattgagcgcttggctgctcaattgcatcagcagcttacactgcgccagctggctatcaatcgtggccagcaccagttcattctgggtaatgaggccgacgctctgcacgacttcgttgcacagactggatgtgccattgttctcccaccttcttccgatgagagtgagttcctcaccatcaccggtccccttgacaaaatcgaggctggtattgaacacgctatggatcttgcgacaagcatgcagatggctagcattgatctgtcccgccagcatcccaatgctcccgccggtcccaatgcccacgcgagcgctctctcgcagtacctccgtcgccgccaggtcgttaaggaactcgaatcgacctacgatgcgcacattgcacttcctcccagcgttggtggacccgtcacttgggaggtgtactcccgtgacggcaagaataccattcgtgcccgttctgatatcatgaacctagtccaggctctccccccctctaaactccgccacgtccctgttgacccatacttccaccagtacctgcgcgacaagagcgcaagtgcccttcagggtgactttggtgtccaccttatggtgccggatgacatcaactgccccgaggttgttcttgtttatgaaggcccctccgcaactgcctcgcgctttgaagtccccagacagcgcccctcacccgcagatgttgcagccttcgagaagggtctgcaggaggcccaggaattcctcctgagtgccctcggagaccagaatgacattgttgccaagacggtctccgttcctggcaaataccaggagaaggcgcgtaaattcatcacccgcgagcaggaggccaagggcgaggacagcatccctgtgcgtgccattgttggcgacgtcaagggttctcaatgcgagatttcgcttcgtggtccctcggcccgtgtggctgaacttgtcgccaagctggaggctttcgtcgtcgagcaggagaaggacgatctcgagcgtggttacaccactaccttcgacttcccccagaagtacgccaacttcctgattggcaagcgtggtgaaaacatcaacaagctccgcgaggagttcgatgttgatatcaaggtggagaacgggaaggtcgaggtcaagggacccaaggccaaggcggatgctacccgcatgcgcatcatcaacatgggcaagaagttggaagatgagactactcacattctcaaggtccccgcccaataccaccgtgagttgatcggccagcgtggaaaccaggtcaaccgtcttcaggatcgttactccgtccgcgtccagttccctcgcgcaactgttgccaatgacgatttgacggaaactggcagcgatgctggtgctcgtccccaacgtgctcagcaggctcccgatgaggtcctcgtcaagggccccagcaagggtgctgacttggctcgtgatgagattcttagcttgttgcagtatgtcattgagcacggtcattctgccaccatctctgtggcccagagtcaggtcgcatccttgatcggccagcgcggccgtgagatggacaagcttcgcgctgataccggtgcccagattgatgttcccaacgccaacgatgcgccggatgcgtcgggccgcgtggagattcgtgtcaagggtaccaagcagcaagttgctgaagccaagaagatcttgcagcagcgggccagcgagttcgatgcgactgtggttaagaccattgaggttgacaagaagtaccacaaggctttgattggtggaggcggtatgttttcatgcaaagtgatacgtctattttcaattactgacttaacataggtgccaacatccgcaagattgtcaccgaggctggtggccctactgacggcagcgccgccagaatggtccgtttcccccgtcccgagagcaccgaatcgaccatccgccttgagggcaacggcaagatcgtggataacatcatcgccgcgatcgaagagttcgtcaaggaacgccaggaccaggtcacggagatcatcgacatccccaccgcccagcaccgcatgctcatcggccgtggcggcgagacccgccgtggcattgagtccaagtttaatgtcacccttgatatccccaagcagggctctggccgtaccgatgtgaaactcaagggccccagcagcgccgtcgaaagcgccaaggagcacgtcaagtccatgctgaaggagcagcacgcggagaccatcgaggtccccagccacttgcaccacgtcctcgccgacaatggccacatcttccgtcgtctgcgcaacgactaccaggtcaccgtcgaccacgccggtcaacctgttcccgtacctgccccctccgccgccgaggacactcgcaccacagctgaaggcaccgacatgcccctgatcattgatgaccccaacacaaccaccgatgcacactcctggaccgttgtggacaacaacacatcagaagtcgcctccacccccttcccttgggttctcagcggcaccccggagaacgtggccaaggcccgcgccgtcatcgagaaggctcttgcctccgcatccgagcagtccattacaggctacctgatcctgccggaccccaagacctaccgctttgtcgttggtcagggcggcagccagatcaacgccatccgcaagaagacaggatgccgtatcaatgtgcccaaggaccaggctcgcggtgaagcgattgagatccggggtagctccagcggcctggaagaggccaaggagatgattctagaggccgtgcagaatggccttcaaggcgctgcgcggtgagtggttctggcttgttattgcgacagtggttttcgatctgacatataaaaccgactcttacaccacccctctctgctttgaattcgagcgagcgggaacaatatcattttagttgtattcttttggcttcttcaattcttgttttcatctttttttggtatctatttcatgaatattggttttttaaaaaggattctctctggtcttgctttcgcatttattgcttttggcctttctcatcctactgtgccttcttttcttgtagctacttccccagatctattcggattgttctacgagttgatagacctgtcgattctttgtgaaagtgacgagagcgttgactgcccaggtggctttccaatctaaatgatttcactctatcatgaatgaattggagatctgtatacctaatttagcttaggacatgctatggtatagatccgaatgcagattgcttactagaagaggaacccgatcgaacgctgtcgaacagcctcggacctaatatcctctcgtctccgtattagaaatcaccttcggaggaactaatgttggagatgcattagagatgaggggacgtcaggatcgtcgctccaaaaggagttaaggactccgggcggatctgccatgtcatcgtgatttgttggttgtacatatcccagcgaggtaactatatgttgacattcatttccataacaattcggttccgaaaactaaagattaatccaataaagtatgtcgatacatatgaatagataaaaaaggtaatataaaataaaaaaaagagttggggtactcataaggccccaactcgaaaaaaaaacgctctctttgctcttttagccatagcgactcggactcccatccgtatggaagacgggtatttaaatctcagattcttcattctgaccacacacaaccccactcgctagtcccacagtcaatcatctaattgcataacgaacgccccggccagtctactgctgagcctgttgagcctgctgggcctggaggtagttgtatgcgccgtatgcgatagcaccaccgacgaggaagacggcgtagaggccgacgccgaagccggaggcggaggaggaagacgaggagtctgtgctgctgctgggcttggccttgggcgaggggtcaccgggctattttttcgacggtgttagtattgcgtgtgacttttgtgtagatggggaaatatggggtgtggggggaaggatgtatgtaagaaggggtgcgtaccaggcgcttcacgttgccgacaaacatgccgtcgtcgaggagtgcgcgcgcctcatcactgtggccgacgtcgtcgaaggcttcggtgcagtcttggccggcgagatcgaggaggacttcctcaccgccactgttggattggttagcctggtggttctggggtttgatgtgggtcggtgaagcaatgcgagacgagtgaagacaataggttgaggtggccttttttttttttcgctcttctcttctactctcgctagcgcttgttctttggcttcgggtattgggattctagattcggcagtgatagatatggagacaacgtacgggtgttcattggcgaatgtggtgcaatcgtagaccttgtcgttgatgatcaggtagaggtccttcttggtgctgtgctcggcgacctcctgcaaggtgagttccttggcttcagacatgatgaattgaggtatctggaatgatattcccgttgtcagtcggggttctgtataaaaaccgggcaagtgaagaggggaatgtgttgagtggagttggcgataggagaaaaccccgagaaatgttggggcggagataggaaaccacttacggggtatggggaagtgataagtccaaaaagcagccagagtaccgagaaggagaagagaagaggagagaagaggagggagaggaattgacgaccaagacagaatcagcgagaaaaagaacaacagatgtcgctggtacgtgcggctgggcggtctcgttcgtgtggggcccaggcactggactttggggatgccgtgaattacagccggcttataagaggagtcaggcaaaaggggcgtttatcattggatggcttcgatgagtttctattactctctatctttgtcgccggtcccgatagttagttctgaattgagtctacactctatgtatattgcgctagataggatctggggtctgacgaatcaggggctgcttattagagtacatgaagaggagatctggccttgggctgtgtatagttagttagttagtatcaaattgtactgtagcatagcatagttaactggtacaagtacattaatcgtatgtacagtaacatgtatgaactcaccataacctcggggatcgattctcgggtagcaccgacgggagagcgttccgctgggcggaattaagtactagcacacttgctgttgtataaatatcataatactatgtgcataataatatacctctatccaatcgtcatcatgacatgctagaaatcaaaacgctcatttcgctggaactcgctcataaaacacaatgtacgcctgctcgttctgtaatcggtcccgcgtccgaagctcgcgcggattgaagttcgtggctcggtcgtcatcgaatttccgccagcattgccgctccgcatcacggaccagcgagatgtagtgtccgctgcccatcgaagacccgagatgccgtagcaccgcaaacgcatcgtaattgaacggtggaaccgtggccccggtggcgggcggcatgccgggctccggagggggaggatgagggtgagcaatcacaaaatcgtccatgcggagaccgtaaagcgggaaatcgatgggggtgtggatcttccgtgcgctttgggtcttggatgcagaaaagcgcttgaagtggacaacgagaatctggggcgctcgcgtgatgatgatctgcttggtcgccattcgcttgcatttacaaaatggacacttccagacctcgtcgccactcagcatctcctcctggcagtagctacggaggcactgatagatatcacctgcacctgtcggtgggatttccacactgatactgtagaatgcttcatatgtagtggatgtttgctggcaggtcgtgcagcgtagtcgactggcatgttgtccggcaaacagtgacgagataaaagactcctctcggtggcagtatcggtcccattcaattcgggaaaccttggtcattggcattcgctctcgttgcatctcctccgaaaatgtcaaaggtcgaagcggtgttcgctgccagttgatattgagatcctcgtggaggcaatcgaccacaaaatcgaagaattctttggcatcttgctgccgctcaatggcccattctcgattcaagcgtccacagaagttccggaacgaggtcggcatgatgacctcgacatcgttcttccacagtgaccggatcaggttcgcataaagtccaggcataacgccctgagatcccttccaatttttttgtacataataccgaaatcggttgtcgatgaagaacctactcagtggaatcgtggcacttaggcattgaagggtggaattcatgtaacacgtcacaccgaaattggtcaatccagtctgcggaagcttgaggcgatctaggcgggagcttggagtgtacagggctgttcgattcgccgagttctgacgttgcaaatggggttggatctgccgcccatcggagacaccgctatagctgggacggggcacagcagggggtggtcgagagggagccactgacatgtgtgcagcataattcggagtagcactaaggggagggcgggaatccgcgtgtgtcatggactgttgaatatcgtgcggttcgggaaaacgacgtaggaaagcctcatatgtgttgacgaatggggttgaaggttctgatccagtctcctcgggttcttccgtcagcgattcttcctcggcataggtgctcgtgtcgatctcctcgactttagatttctccatccactcagataattccttcgaattcaaaggagtgaactcgcgcagtcgtctcttccgaatttcgagacttgagttggcactagccatggtaggcactctcccgaggggccgaccaggtctagatacgggctttctggcctgcagagaactcatggccgcagcagttgaggacgtcgcaagagattgttgtcctaaaagatcgatccaggcatccaatccaccaactaggagagccggaggccgtcccgccttcagaggcttatatgcattgaactcatagagagtatcgtagagagccctcaaatggggtgctgaagtccccaccggtgagccagcgagatagctgacggaatcggcgctttggtcatagtaaaccacaaggtcgtactcgttccgtttctcaaataatgcctgttcatgctccggtgaaacaacgagacgctcctctagttcttccgctgacacattctccttcagaaccacaggttctatgcaaataatagattttgcatatacatgaccattatcgtactggtctcgaggccgaacatcgattagcagaacattaaatttccgcagattatcaaggaggctctgtgcagttatagttgtgctgtacggcaaatcaggtgagttgctccgagtttctcgcgccgagtccaacccattgggcgtcagggacctatacggattgtcgtcaaagcctccccgcgttggactgacccgtggtgagttgctgaattgcgagtatcttggattggttgagtgtgtgctctctgttgaccttctcggtgggttggatgtgggttttgatggcacggtgaagacagggctgtaagccgggtcgggagcacgtggtaacgatgtgttaagaggaagcttcggtggaatggttggtaaattagatgaagagcccatgacccgaggtcccaatggccgtcttggcggtggagagttgtagttcgatgaataaagtggaatttgcccagcagatcctacaattgggcttcccagccgagtagtacttgctcccaacccatgctggttggaaggaggagacgccttgagtttggcaaatcgttgcgcaagtgtgtcatctgcaggactggaaaacctctgcaaatttacctccgtctcgggcactctttgatactgagttggacttggcattctagcgaagtttgttccagactcttgattctcacggccccgtggcgtgacagaaatttgttttggggatctggatgtatatataccggttggctgcatgccactgaccaaattatcctcgatgatttcccgcttgatcgcatccatagtgccttgtttggaccgcaccgccttcactagatcggcgaactccttgtaccaatcagggcgttggctgacggtgcgatagtctggatgatggggaatgagattgatagtgatttcagaggcacgaaggtactgaacgtaggctttatcgttgtattcgtcgtctgagaggttcttggcctttgcgattgcatcggcagccgttggcaagaggatatcaagctatgatcccggttagaggaaataattcacacaattgtcagaagtgcgcatataccggtgtagtctcgttaacattcaacgcagcagcttggtcttgtaggtctttgatattggggaaccgaggtcgccgtggtgggacgagaggggccttgcccttgggatacgaatctggtcgggtgactcgtccgttgggatccatgtcgttccccatgtcgttccccaccgagtaaggacgccggttgtccttccacggtggtatttttgggggagatggcaaagtcgccgcatcggaggacatggtagatccaggcagcgacaagcggacttagcgcatggttatgtccaagattaggaaaacaaagagagtaaagccaaaagacaggcgtacccaatccgccgaataattgatcaagtccaaataacaaacacaaataacgaaagacagaccagagtaaagaggacagatccagggacaatgcgggatgcctctggggtaatcagatgacagtacttcaccgccctcagcctatgacgccaggggcttagtcactactgaggtgcctggaagctcctcctccaacttgccagtctgatcttcatatttgctagattaagtgtcttggctatctgcaacgctactgtgatctgagtcccctccaaattagacgtgcatcgggtgtttcgccttcgccatggcaggctggttctcttcaacctcgccgctcgatgagcaaatcgagcgggcgacagcttcctccttgtgagttttgattgccgcgttgttatcatacctatatgaaccggggctacctaccaggatgctctgaaatgaatgatcgcgtggctaactcactctcagggaagacattgccctcaacctggagatatcagatatgattcgatcaaagagcgttcagcccaaggatggaatgaggtctttgaaacgacgactcgagaataagaatcccaacatccagctggcgacactgaaggtgaaacatttattcccgtgagactaggcttggaacaagcgctgataagcccgcccctctagttaacggatacttgtgtcaaaaacggaggaacacatttcctggccgagatcgcgtctcgagaattcatggataaccttgtctcattgcttaaatccgaaggcgctcctcttaatgccgaggtgcagggcaagatattggaacttatccagaattgggctatggctgcacaaggccgtatggatttgatgtatttgggagagacatatcgcaaattggagagtgaaggataccggtttccaccaaagaccgaaatgagcggcagtatgctggaaagcagcgcagtgagtgtgcctcaaacccttccgttgcagaagctaatttgtgaatctgtctcagcctccagagtggatcgactctgaagtctgtatgcgatgtcggactgccttcagttttatgaatcgcaaacaccactgccgtaactgcggcaacgtgttcgacgctcagtgttcaagcaagaccattcctttaccgcatcttggaattctgcagcccgtcagagtagacgatggatgctatgccaaattgacctccaagtcatttgcgccaccgggaatttcggatcggtccgcgttcaaaaacaactccatcagcaaatctaacacgatggaacctcgtgctggtaaaccggacacagggttcgatgaggatgtgcgtcgagcgttgcaaatgagtctcgatgaagccgagggcagaggtccttccgggtttgtaccgcagacaggcaacgctccagaaccggccaaggctgttccaaagccggagaatgtggacgaggaagatccggatctcaaggctgcgattgaagcatccctgcgtgatatggaacaacacaagcaaaaccatgcggccgcattgaagaacgtgcccacttcaaattccaccttgcgcgattcctcgagcacgcccactcaattgcctaaaaatccgtacgaactaacccctgttgaaaccgagaatattcatctcttctctacactggttgatcggctccagcatcagccgccgggcacaattcttagagagccgcagatccaggagctatacgagagtatcggtgcgcttcgaccaaagctggcacgaagctatggagagaccatgagtaaacatggtgagttcagctgtctttatttatagaactgcaagctaatcctcacagatacattattggacctccatgccaagctctctacggttgtacgctactacgatcggatgctagaagagcgtctgaccagagcctattcccaacacaatcttggtcatggagctgttcctgggggcgcgcagtatccaaatcttcagccagccttctctaatcacgctcccgacgtccagagtggagccgagaatttctattatggaactcaaatggacagctctcgcccacctactactatgtatgctccgcagcaggtgaacggcgatgggttccaagttccatccacctacccatcacaagctcaacatggtgccccgacaaatgagtcttacggtcagaattggggtggaaatacctacccggcccttggatcacctccacctagcaatggcattccaaataactatgccaatgccccaacgcccagtgccccggctcaatattacgcagcaccacacgaccaagacacagccaggtcacccggcgcagaatccccataccagccgtcgcccattatgcgccgggactcctctcagtatcaggccggtgcaactcccagcggtccaacccctgctcccgaacaacacgcatctgccgggtatgtgcaatcgccgggctattctgtgccacccactgcgccagcacttcatcagcaggcaacgggcccttctcagtcttactattacccgtcacaaccccagcctcaacaacctcctaatgctgtgtcatctgcataccctccgattaacgctggacaaccggggtcgtatggacaggaaacttcgcaaccgccttatcagcaaccagcacggcccgtggaggaaaacctgattgagctatagcgtcattatacttcgttcggcgttatctatgttttcatattttgcgtttttttttcgcctcatgatacctgaagacttttagcagattgaatgtgtagcttgaagtgggtgaatgaagggatctcaagtatacacgaaaagacactgcctattgccagtggctaatgctgccaatagttatttccaatatcctctagagctctctacattcttaagagtgcattttaaattatttatgtagctgggagacgacctggattgttccatttatagaagagcctcgccgctgccttaggcattccacaatattgttaccgctctttaatcgccgaagacagcgacctcgctctccctcttcttcactactctaatttgccccggatttctctcctgctcttattcttttcgcattccatttgatttttcgttcattattagcggttcgaaccggtgtaacccggctttcagcttttgagtcttgattgctttttgcctgcatgccctctaatctgccgtgagacctcttgaacgacttgcctcggccaatcgccacactctatgctctgtgaccaccgctgattacccgcctgtggctcctctggggtctttttgcttaccgccatgcctacctctaacgcttcaaatacctcttcccctgttaagcgccccggcctcggtcgccgtgcagtgtcctcccatgcagttgtcacgcgcagcgccaatcctaatgacctgtcggtgtctcacacgcagaaagcacccctacatcataaacctcaccgcacccatgttgttggagctcaccgtaatcaccaccgcaacccctctaccggcaaaaacttcaacaaactccaacgtctccaagtagcagctcccgagactggtgggcggcaccatcagcgcaagaagtcagcccccgcaaccccgatcgcgagtccaaaggaaagcgggcacgttcgctgggatccggttgtaaatgaccatacaaccgatccttccatgaagcgaaacttttccactcctgtgttgcgacggaatccatcagccgttgggaagaaagcgttggtgactgagcgaccgccctccagcgcgttaaagaaaaagtcggtcggctttgagctgggggatgacgagactgacgacgctgagtgggaagataccacgcagtcacccgaaagtacgaggcgcaactcggtggcaccatccaatcccagcgcagacaatagtaccgttcttgtcgaccaccttaccttcgtcaagcgaccatatccccaaatgcctcgagcgaccagtctgcccgagtcgatcaccaccaagtttgtccgagagcgtactgaactgcatgaggatgaggttgcggatgaggaagccgagcagcacgatgaggaagaagaagccgaggagtccagtcagcacacggagcagggcgacatagcagcccggctgctaagtcctacgcactcatccaaagcgccccctgccatgtcttctatctcggctatggtgaagccggaagccaatagtctcaataccccgtcgcgtagtagcgcatctctcaacctggctgctggccaggacaacgctcggcgcacattgtcgtcaaccagcatggccagcatgccgggctctcaaccccaagctacctcatcctctatggaaggtggagtctccaggttcattttggacaacaagaatagcgttgaggaatcttctcgcaacgattcggacccgaatactccctcgtcgttcctcccacactaccaccccgacacaccgccctctccaaccagtgcagcggccaagatgatcgcgtctcctgcgcggccgcgtggtgctgacctgccttctcgcacgcaacagaagctctggctgcagcgtaccgctaccctgaataactcacctcctgataaccatggagtgaccgcagcagttccgccgtctaccattgacccgacatttatcgccgctaaccacagcacgtatgacgccgccagggggctcaacggtgacggccgagctggcggtgcaggacatgacagcgaaacccgtcatatccgcaaggcgtatgagaagacatccctagaactaatggtcgtgcgacgtttccagtctcccaccggtcagagcttcgctcgtcttcgtcatatcgtcagagccaagaaagcggagcaaggatcagctcttatcaaagcagtccaatcagcaccttcgctgtcccttttgcagcaaagcaagcagcccactcgtcttagcaccagccctacatctaaatcccagccgcgtaatccaacccgcactgcatctgaagatccagcgacaaataacgaacatcccaataccgcaaatgctaccaaggccaacgacccatcccaccgcatcttctccacctcaaccgaagcttcacgtggcccaaatggtgacaacgacgaaggatttgagcttaacgacagcgccatgttgatccgccggatgtgggagagccgagaggtcgccatccacggctaatttatgatttgtttcaccccttttatgtttatgacggttcactctatggttgttcggcgctcgcattctgtttttttttttatcacagcgatcaggttgaacataatttatccttgttctttttgctttcctgccctgcacctctattatgttgatatgagtagccaatgccacgaatttccatggtaatcacaacccacacagcccactaagcccactaatgtcccttgtcgatccaaaacaaatcggccgcctgggagtggcctggtcggctgttgtccttgcaccggctgctctgacttccggggaagggctgcatggcctgacctgctgattaatcgccaatcccgctctcctgatttgccctacaaaaccctaactagatggcctcatactccagacttcttcagacttctgtttcgtttggaatatactaggaaagccatcatggatctcgtcccgctggtaacaggtcaagtcctgcgcgccgcatactataccgccggacttgttctggtgtcaatcgtcctcaatgtgatcaaccagctcgtcttctacaacagaaaagagccacctgttgtctttcactggattccttttattggaagtacagtggcctatggcatggatccgtaccagttcttcttcgcttctcgtgccaaggtgtgtagatcttgcacctcttgatgcttccgtaatgaaaggtgacgcctactaatgaacggacttagtacggcgatatcttcactttcattctgctaggcaagaagacaaccgtatatctcggtgtcgagggcaatgagttcatcctcaatggaaagttgaaggatgtcaacgccgaagaagtctacggcaagcttacaacgcccgtcttcggatctgatgttgtctacgattgtcctaattctaaacttatggagcaaaagaaggtatatccccttctgccacttattacaaatctcatatccagagctaatccaatcctaaacagttcatcaaatacggcttaagccaagaagccctagaatcctatgtccccctaatcgccgacgaaacaaatgcctacataaaatcatcccccaacttcaaaggccaatccggtactattgacctcgccgctgccatggccgagataaccgtcttcacagcagctcgcaccctccaaggcgaagaagtccgcgccaaaatgacctccgagttcgccgagctcttccacgaccttgacctcggcttctccccgataaacttcatgctcccctgggcccctctcccccacaaccgcaagcgagataaagcacacggacgtatgcgcgagatctacctcgagatcatccaagcgcgacgcgaagccggcgaacaagacaacctcaccggcagggataaagccaaaggcacagacatgatctcgaacctgatgcgctgcgtgtaccgcgacgggacaccaatcccagacaaggagatcgctcatatgatgatcacgctgctgatggcgggccagcactcctcgtccgcaatcagctgctggatccttctgcgactcgcctcacagcccgagatgacagagaagttgtacgcggaacagatccagaacttgggcgctgatctcccgccgctgcagtacaaggatatggataagcttcccctgcaccacaacgtcatcaaagagacgctgcgtatccactcgtctattcatacgcttatgcgcaaagtgaagaatcccatgccggtgcctgggactgactttgttgttccgccgtcgcatgtactgctgtcttcgcctggtgttacggcacgggatgcgcggcatttccgtgatccgttgcggtggaatccgcatcgctgggagactcgggttgaggttgaggattcttcggataccgtggattatgggtatggcgctgtctctaagggaacgcgcagtccgtacttgcccttcggcgctggaagacatcgttgtattggtgagaagtttgcgtatcttaatttggaggttatagtcgccacgcttgtgagggagttcaagtttttcaatcctgaagggatggagggggtgccggatacggattattcggtaagtcttttggtttcttttggcttgggttgatggggacatgggctgacttctttctagtctctcttttcacgtcctatgcagccggcgactgtgcgatgggaagtccgctcgtagggcttgggaacactattagtcttagtcttagtctcggcgagtcaacttttgtttatgaaaaatgtttgtatctttaaagagaggagaggtcataagttcagaagtaatttatcaataataggcagtatatccatctattccggtcttttgtaagtgaccagtacttcaatcgaacgccatatttacccagacagcttctaaattgataaacaagaccgaacatggtggataggtgaaaggggggggggaggggtatgagtagatggtatgagatttcaatgaaagaactaatggtattgtagttcaaaagcaatcatatctcggtggaaattgaatggaagctgaaaacgtacatgaagaaaagccattgagagaatgaatgccttcttctcatgttgttatgcgtcgttcttgcccctaccgcgttgattgccgcctccacggcgaccattggcattcccagaaacatctccagcacgatttttattcggtgctctttgagactgagctggggcctgaccactctgattcgtcttggggtttgtatgcccagagcctggagccgatacgcgcctgtgatcttgaggagcaggtccatcaccggtgtttttgttggctcgacgcttacgcgggccactggcagcgctagatgtcttgccgcctcgtccaccctttccagggcgaggttcatttggctccgggtctaccagtccttgcacacgcttactttcttggtcccaccactgctggaactcctgctcggcttggatctcttgcattttgtgcttggcggtggctgcttcccgaatcgcttccttttctgtttgttgctggagcaaaatggccgacagagagtacgagccagagggtgaagagcgtgatcctgttaggtcagggcgtgggatgtgacgaattgactggatgactggctgtggtgatgatggttgattgttgggaggtactgtagaaggtcccgatacggaaggtttcgaatgagaatagggctgtgggttccctgacacactacggcgttgtgtttgcacgggtgtagccactgtctttgactttgacggcggcgtgccagccacagtctgccgcatagtcatggacctttgaggtgatgatttaacagcctgagatgctggggcgctttgacctgggagagggtcgagtttagggagcgacgctggagaagaagctgctggcttttgccaggggttctgtggtgcctccttcgccttctgctgggcagccagctgatcttgtatctgttgttgctgaagcttctttcgctccttctgagagatcttaggcacgaagttaccgctgctttcgcgtcgatctgccatgcctagcgtgagattggatacccgagactgtaatgcttctcccatgatgtctttgatatccttcttggaactagaaatcattggcgaggtccatggcgcagaagagggattagatgacgatgctagggcttctttttggttttttgtcatcgccctggactcagatggggactgtagtagcggatcttgtggggaagacatctgatccttcaagaaaccatactcaccgaaggactcggcctctgggacgcttgcccccaaagctggggagtcagggtatgattgattttcaggtatgccttctgtgaacctgagttcacgcatgacacccttgcctttcgaagcacttggtgatatgagggcctcgtcgtccatttgaaacatgagatcaccaaccgactgtctcgacttcagcattgggctattaccaacatttggtgactcccgggatacactgttcttcgccttgcgtgcagacggagatgaggtacccttctcgttatgcattgaccgggttcgcgcatcgtcatacggctcgaaacgaccaaggcgggactgcaaagtcatggcatcgatccttcgttgcttatctgcttccacggagctgacaagttcggggtatttctcgaagacatactcctcagaattgcgcccacgggatatgggccagcacgccaactgattttcgtgacagatcagatccaactcccaaagcagagtaggatccagatcttcgagatatctgttagcgagcatggcctcgagatttagacagatatattccagggcagcatccttgaactctgtgacacagcaaggggcaattgaattgagcaaatagcacacgtttcgcgttgtgacgaaacgaccgagcatcttctgacatacttgagatagtcggtcgatcatcagctcatttgccacgaacatgacatccagaagcaagtcaatgaaatcatcaacatctccaatccgtacttcatcaaacagtcggtcttccgtatcggcatataggtaacgcaggacgaattcaaatgtcgagcgatcaatgtgctttaggtcgacatgcacgctctggtttgggtccgctttgcgcgagtctagccaccttccacccgcatgaccatggaagagtgtgtcaaagaacggacatctctggcacacgacttgactgtgcactttgattgtatcgcctttgagctgaagagtcacgtctgcgctgtcaaataagaacgagtgattgatggcatgggccatgtcgattttcaggcttctttgcggctcgaccattagtcgtgctgcccgctccagcgctggcaggcctagttgcatagaaacccgcataacttcagtgcgaacctgccggaaacgggccgagtttgcgggcgagctccttgccaggcgccagacatcgagaataccgtctgtgtaaaggaaaaagaccacgttcataacggtcaaaaaatcaacagcttgaaggcagatctgcggatgtccgtccttcccgtattcaataccaaaaacgtcggggacggatgaataatatgactggcggaactcggccaatgcctttcccagaataggaatgcggccagctatgagaaattcatgaacaggaatacaagagtcggatagggagctggtcacccaaacagtcccctcgctccgtacagaaagaaattggctttcaatatccgatgatgaaaggatggctctttggatgctttttccggatgaaagtacaagagggatattctgagcgtcatcttcgaggatcgagtccaactcttccagacctggggttgaaaacggggacaacggcaacatatcatcccaaaggctgctttgctcgacattaatttgttccctggtcacttcgcagtcacgttgagccacggcgtaggccccaaacgcattgctgcgcactgccactgcccgtgagagaccaggtatgcgggcaaatttatattctttcgacgctctttccttgttctttgtccgccgttcttttctccacgcagatccagatgttgtacagatgataatcgatccgtcttgtccaacatcaacatcactcgctgccatgtatgatttcttaacggaccatgctttaacaggggcggctaatgaatttcgaatctttgcaggattggttgtggacgttaaagccgaagagttatcggactggttggcttgaacagtgaatacatcaccagagctggataatgcacatatggtgttgcctccacacacaatcttgacaacacggtttgcagtcttgtcgtatctggttgccatgaagctatccctgataaatctggagctcacttctagtgggaatgaaagctttgaatagccatatgatgagaaaacccaaacttcgtggttctgcagaagcacagacgtagcacggtcaatggcggacaccatcttgattggacaactgaaaagagatgctccaacgcgccgtggtgtcgtttgtatctcaagcgaacgcgcatcggaatcgaccaagccaagttgaccttcgttcttgccaaacgtatagagaccagaggtactgaagaccaccgagtgaatagacgacgctgctgcacctatgatcgtctctttcttgaacggattgaaaatctggcgaggagtcgtctggatgggaatgtcgtttttgttgctagtcctaggaaggccatagccaagttgtccgaacttgttgcttccccagctgaagatctcaccctgctcggtgattgccaggctatggtcttgacccagagcagccgataagactttcttcccctctagtccacctgtctcaatacaagcaaaggtgaaacgcgtcgactcatctcccgttcctaggcgccctccaggaccgaatccacacatgaacagattagcctcggggtcatctgtgattatggcagtatgcagtttggacataataatgtcttggaacttcattggcttgtttgtgatcaaagtgggcagctcggtcgttttggtcttaggcacggtatcttcgagccctaggtgttccaatttctcgtgatattcacgataaaatcgatgcaaaagatgctcagggcgcttcaatgagatgcgctcaggaaattgtctgtcatcctgatcccctaaaccaaggttcaggtttttgttgcttcctaatgtgaagacttcatcggcggcaagatccacggcccctttcaggacactcctaagagtgtatgccccatcttccccatcatctccgaagttcgacgcagcattggaagcaacatcgctgccgagggcatcatcatcattatatgaacttggccagttttcagagatatgcttaatgtcgcgggctctaatagtcgccccgaagacatcaaaaggactgcaaccctcacgatccttgatcttgataaggccaccacttggatggctcgtatttccacctttgctgaaatctgtcatgtcctgcagatcgcgcgccatgagcgccagagcaattgtggcgttcccggcataaagagcccgatgcagagccgtccacccactctcccagtcctgcgcatatatatcgataaacggaacttctaacaaagcacgtgcaaatttggacgcggtaggtctcgaggacgaagcgacatggtgcagcagtgtacggccgtaatgatcacgggcgttaacatcggcacgcgacaaagtcgcgctcccacgcggtaaggccgcccggtcaggcacaaaggccccaggggatgatgcgatattctttttatttctcggtatatttggagacgaagcaatcatggacccagggcttccagctttcgatgacaggtttgtcgcagctctggaggtccctcctgagcctccggcagctcgcgggcccgcgaacgtcgcgttcgccagagaccgctggaaccgctcgacatcatcttgaatgaaacactcccaaagcttattactcatgtgcccggagtggtcgacgcgccgaatctcttatcaggcccaagctgagcgtcgccgtcaccacagtggggtggaccgcgacgggggagctaggtgataagagaactctggttcaaggggaagggtaggaattgccgacgctatgggtataggtcgacgcgatcgtggtgtcacaatttttgatcgtggatttgacgcgaaatggattgtgggctcggggtttgcgcgtgtggcgaacgggcttatttgcgggcaactcgaaagttttgaggaagaggaacgaccttgggagggatgctcgacggagttggaagatctgcaatgtctcgagatgtctagatggttggaagaagcaagatgtcttgagtcgcacttagcagaaatccagccggtttgccctccatgtcatccgtggatcgtggagcactgcgcagtggacgataatgacctccgggcccaaaccccacaaatacagtaagtagtagtacatctatatcgagggttcggacttcccaaactgctctgaatatgtagttaaacatgtcttttaaatgagtaacatagatctaaaagcttatagactcaacaacttgccttgtaagccattatcggcttccaaagcactccgtagaatgtaaagaacatagccaataagctatatactacgagaatccgtattatattcccagtggacgttatcaccgtctctttccaacctctggccaataacgacgcgcacgtccctccatgcccccggacgagaggcgaggatcatccagggcagagcccgtggggaactgataggatgatgttgtatgtatgacatttcatttcatttcggatttctcatctagaatggcctgacatgcagatcagatctctcatctagaatggcctgacatgcagatcagatctacatcataatctttcgaccaatttccaagtccggaatccccgtcttcagctgtgcacgtcgccggctcagcgccgcattctcccccgcaatctccgtcaactgatcctccgtcgggttcgcaacaaactgaggcgagaaaagtccaagcggcttgcgtggtcgggtgagcagaaagtagccggtggctttgagtgcagatgttgtcgacaaaccgcttagatgcaacatcgtagtaggcagccaagatgtcatgaatgtaacgaacagtgctctcggtgttgctcattggagcttttgcctcgtcgtcggtaggctcatacttctcccggtggctggtggaaagatgtcagtgtatctcgtaagtcgattaggttagtcagacacaccttctcttttgagtttcctcaaggctctcataaaatccgtcattcaatgtcgttatgttcatgcgctggacatcaagaaccagcttggcctgctccattgcttctctgtatcgcttcgacagctcatcagcgagaacactcaccagtttgtcgcaaatttgctcatccgggcaggtgactccaaggactttgagaataaaggcatgcatgatttcgatcacatccctaacatatccgagcgcgaggtcggcccgtttcccagattgccggttcatgatggtgcacaataaagagggcggaaatgtccccacttcgaatccgcgagaagtacaataccggtcctcgatccatgcaagaatgctgtcggttgtgggcttttccacaatctcttgctcgtgaagaatgccatcaatagcgccactgttgtccaacacacccatgtgcttgcgaacagtgatttcgccatcatcttcctcatcctcctcatcttggatatcggaaatctcactgacgaactggtattcaagcccatattcttccatttcggacttcaaaacttccatgcggtttctgactattgttgtcagtcgggtatccttctctttgtcgaacaattcatgtgtgccgtatgaagttgtcatggcctgcgaaacaatatcttgaaatcgagctatgaaatcgagcaggaagcttctctgctactccggggtacttcgctcatttccaaaagcagacaaatcatgcctcatggccttcggctttcgaccaacatcggtacgcatctgcatatcaagtcagccaaatctacaaacaaaacgccagacggtgtggcataccttaggaaactctcgacgaatttgagtcgtttgtacctcttgcaggcgaatcttgagggcatgaattccaactttgtccttcggaaggttgctccatgggtgattctcccgaaagaaccgggcctcgaccaagtctcggtcagaactctgatcaagtagctgttgctgggcggcattgcgcacaacaatccagccaagcgctaaggaatgagatttgccctcaaccaagtcgatgactttgttttcagcccccttgtctaccaatcgggtttagtcaacactcccagggtgcgaatttcctcgggatcgcactcctgcgccatctcgaggatctcgtgtggctatgtccacatttgcgggaacgaggtttgcgcatgtagcccaggaccatcttcttcaccatctccatatccagcttggtagtgagaccagatgcagtgttcttgaaaatacctgggacatcaatgatactcaaattatcttcttcgggtccacagatctccaaccggaagacatcttgagtgaaggtgggcttgaaagggtcggtttccgagcctgataaacccatggtctggtgaatctatagtaataactagtcattacaagggcttcagttatgatttgctcaagcagcgaaacttacctcttccatggtttcagcgaaagattcggggtcgagtgattccatattggctcctttccatgctgccaagcgagaagcgtgctctgggtctgtgtcgggtgctggaacgatagaggcagtgacagtcctctttttgtccgctttgatccgtcggaagatgatgtgagtagcaaactgagtgcaaagtccactatccctggggaacggcaacttggttagccccttaagaacggagctttttccactggattggtctcccgcaacaacaagctggggcaagttgacgtattcaccaaggttgtaggctaggagccggtcaatcttgtccagcagaactgggtcaccgagcccttggccaggcaactttggagtagacgtaacggccacggtggtaggggatgaaaatgtgtgacgttagaaggttggatttatatcatcttctgaatgaataaaaggagagaaatggtgagtgagaatgggaaatagatggggggaaggagaaaatatccattcctgtatatctttcaacttggactaggtttccagaactttccgatgatctatgatagcaatcatatcctcttcatctacccagtttcaatggagtcgcattctttgagtctttattagcacccaattgagaatcacctcttagcaaactgatagattcaaagaattatcattatacatacttcctgtgctctttctaacatatagcattatgtttgttttagaagtcactccccaaacattttttcactgacccccgtacgcagtattacggcgttcgatggtcaaaccccggcggtgtccggttggattggaactcgaagccaacaagttgagttgttcgtcaagttggacagctccgggttttgaccatcgaacgcattcgttcgcataaggaaattgcttccgaacgtagtcctgaaggtccgcccatgccgcttgctctttgcgccgttaatcgtcgcgtacaccgtaccaacaggccgcccttcttccttgctgaaacggctagtaaaagccgacagatcggggccgtaccactctaggcattcgttcaactggcggctgacaacaaaggatctatcatggaccccaagattccggaatccgtactttccacttccttccattcacatgagcggttctttgctcataacgtcaaagaagatctctgaaaccgaacgccccttcacaggggggtcgtaaataccgccgccatcaacaaacggtcttgttgcgttgcatggcgcaatatcgcgccgcattccattacggaaagcaaagacaagaagcagaacaccttcggcataatttatcgtcatgtgtagagacaactccttgatagtaacggtgtcgaatgacgatcaatcatgccgaaggtgctcgggagtacagcgtacttatccgctgacgacggaccttggacatagatcgttcagtgatcgagaatattgaccttcggtatctggtaggaccgatcaaactgcgcgggtatcaactgcacaggtacactccgtggggggccacgcttcgcctttttaacagcgcgttgcactttagcctcgatatacttgtcgagagaacctcgggtatacttcgaagaagtacgaccgcccccccggcccnnnnnnnnnnnnnnnnnnnnnnnnnnnnnnnnnnnnnnnnnnnnnnnnnnnnnnnnnnnnnnnnnnnnnnnnnnnnnnnnnnnnnnnnnnnnnnnnnnnnnnnnnnnnnnnnnnnnnnnnnattgctggaagaaggcccgcccgccgcgacggcggcggtattagctcttagccttaccggcccaggatttcttaccagttttgaaagccatttttgttatttagaaagtttaacagatttagaatgaaaagggactaccgtgccatactatatcatatataatataacattggcggaatgccaagaattcccctatcggatcattttctcagagttccagtctttagttacttagaatatcctttcttagatacagttacaacttgaccgtctatatactataggcaatactatcatattacccgagactaaccccttctgactggttagcttacacttatctgactaatagttagtatctccttctaccgactggtaactaggtccctcctattcctaaattttacctaatcggggaaatacgttgagactcagactcaagtttttagggcaaagtaatagtagaagtgggtccacttcattgaaaaaagtctgtccaattagattcaacttgataaacaactccacttggttgctgcgagttccaatcctaccggacaccgccgggttttgaccatcatacgtacagtacatgggtatcagatataataaggtttgcgggccgaacccatgttctccgtacccgagctcctctgccaaaattattgtttaggttaactatttcagtgcacatactaaattatttgcatataacaatacaatggggcagactatctgtgtgatactaggacattcaggcccgaaggatcttccctgtcgttcagtcacctatatcaccgggaaatccattagatagtccttgataacaaaatattgggagcgatcatctagctatccaactatccatttagtagtttaaagaactaatttttgttcttttcgtacttggattaatttcaacccttttgaatattaagtatactgaaatgaaaatgtggcataatcacaggtgagaataaatttttgttcgacttctccgatctagcccgagggctcggaatggagcggcggtcgccccagcaggttggagtaatctcttgttagagacttggatggtaaaaagatatattaaaaagcaaagtcggacacagctggatcgcaaagtcaaagtaagcagaatccgcacaggttattcacatctttttcgtcactcccagagccctccaatgccctatcaaacccccagtgcaatggatgccgcgaagaagagcaccaagctcgcttgctatcccaactgtttgcacaatttctgcagccaccctcgatgcttcaatctaactacttgtctcacttacacagactgtcatgtatgcggttcgagaaagtattttattgaggtttggaggctttaggaagttggagccggggattcagcagcctcttcctgggcatatttggcttcggcgctagcaaaggcagcgtccagctccgtgcaaggctcatagctggcgataccaacaactccgtcatccttgtccttcaggtagtaccctccattttcggggaatagagagccgtaaggttgatctttggccatgtcgtggagggcctgtctatcgatgaggataatagagtcacttggaggcgtggcctcgtcgcgggtgagggcttcaaccatggcggtaaaaaggcagaggaagggcacgatggagatgaaagtgaatttcatatcgaatgaggggcacataaggatccctgtaacgagtatgtgtcttagtcatctctttttatggtccacaggtgtatcgtgaaatcttgaggcataggttgcccttgaacataccttatgattgattgaaaggaagtatgagactatgatagcgatggaaacatgatgtcttctttatagcacttggatgtgactaggtcagtcaactgtcctccctgcagacaactatatagtcaatgataagtaatcatatcacgttgaatgctctttgcaagtgtgcccatttttcagttatttcaaggattcatgcagccaccgccccaggacggaggggtgacatgcattcatgagaggtttcgcccggtattacgaggctagagggttggaatgatctaagacataccagggtctttcgaggatagggtgttcaatggattgttgctgtctttgtggcttttgtggtggaactgtgagaatgtccgagataggcatacaatacatgtatatcccctagtcaaacatcccaatataaacaagccctgaccggcgggagatgccgccgttccggatgtatacgactacaggaaggacatattcaagtcgtctgaaatagttgatttgaggattgctagagttgctttgggaaacataatactatgacatcaatacccttcaatatatatgttagcgcttggacgccgaaaacataccaactatgcccagcttgaacacacccatggacctatatagacagatgacctcttggaaatgcctgctagtaaaataaattgtttataattttgtagtacgaaaccagatatatttagtgagtgaggctaaccaaaaaaagaaaaaaaaaagacaatgaggctgacccgatttgaacggataaccttgcgaactggagtcgcacgcgctaccgttgcgccacagccccttgttcgtgatatttaacataatgattagtatgttaaaggaaaaattgttatccaacccttcactagcctcatgctacgtagacatatactctgactgaacgaataatttcgaaataggtatagaagcagtcagcccttgagagcaatggacttagtaattatgatagcttggatcactgttagcatttgttatctcatgggtagcaagtggctgcgctaatttatagattgacctctttgttagaccaattacaggactacgaggcatccatttgaggatgctataacagcttcctatggcttggttccgttgttccgtttatcttgggctgatttttatctgtctagtctactccacatgagcttctttgaatttcatacggaaatgccttattgtagggccccaatagtacataacccgaaagatttccggcttgatgggtgaatttgagggatttgggcgatattttcaaaaatggtgaatatgccttcttttttcctcctcctgttgttttccttctggaattgtatatgtggcgcccctgaagagagtttcttcaacaatatgtgatccactactactccgtatgcgaaaaattcagctccgggccctccgatgtacggagtacgggtgggtcttcactctaaaactaagaggcaaaattagtcaaagtcctgaatcccggcgagattataagagtaaacccacaagagcttagttagacagcgcgtaagcctaaggtctgcagcagtttagaagagctgctcgggatgatcaattgtggggctaaactagcgcatcccacagctcatccattattctgggatttggtgaagaaataaagctggaaaatgttgaccgaaggctgaaatcataacaaagaatagaagctataccgaaccaaagaccatatgcctttaaaacataaaaaaaagttgaggatgtccatcgctattgaccatggactcgatctcacccgggtataaccataggatgttgtatgtccacgtgcatatcataaactagatccctatatcacttacaacatatgctcccctctatcctctcatttctgcttctaccaatcggtcttgtatcctattccaaacctcacttctgattaagctccacacttaccaaaaggggaagtgtcatctgcctcccaacatctctggaattttgtctcgacagaatgaagctgaaaagtgcaacccaagtcctttcatgtgaagcgccaatacaaagttagcgtcagcatcttatgcaagagcctgctttttgcaagatatcctccgcatcttgaggggtaacgctaagacaatgccggggtagagccctcatgcgcaactaattgggtatatacggatgtaggatatggagctaaacgtgcttactctggctcgagtcgtattcactacgtatctgtcgcagaagaggtttctccgatacaaatgtctcaataatcagcctcggatattggatatcatgccccccagacgggaacaaaaagaaactttgtgcggggttttggcgccgatcttccacgagtttgaaattttgttaggccccaacttctatttagatgctgaaggaaaaggaaggtaaagaggtgagtctatcgataagtgtatttgcatatcgacctgctaaatgtgttcacgcttctgtaggcagaagatatcaaacaaacctcatatcagggagtctgaaaggcatcagacagaccatgtattgctccgaatggtttatgcacggagtatcccccgttgccatgaacaggtgatgatcgtcgcactgttcaccggcctcggtaatctatatcaatcacattcttagaagttgtttaagtatataatatgagaatcgtcccgctctatcatgtagaataacggccttgaatcccttatatagagcaggaaaatggcattgtcccttgcgctcatggtgcgcctagccctggttggcctcgtggtattcacttcaattgcctcagccctgccggcgcctcaagtccctcgcagcacggttcaggaccccgacactgatccgttctatcagccacctgctggcttcgcatccgaggcgcctgggacaatcctgagccaacgcaacatcactgccgcgttctttggtctcgtcccggttgacgtggaagcctaccagctgctttaccgcacgactgcaatcaatggctcggctattgcaacagtcaccacggtgtttaagccgaaggacgctaagcttgatcgtttcgtttccttcgccacggcctacgatagctctgcgacgaaatgtcagcctagctacacctaccagcttggttcgccacaggacagtttgatagcttcggtcgagctattgatcattgatatctaccttgctcttggttacaccgtcgcttctcctgactatgagggacccgaggctgcctttggacctggtcgcctcgcaggtatgggtgtattggatggcatccgtgccgtgaagagcttcaagacgttgagtcttactgatgaccccatggttgtcggtataggctattcaggtggtgccattgctaccggatgggcagcctctctgcaacccctctacgcgtcagagctgaacatcaagggctgggcgcagggtggaactcccgcgaacgtcactggcacaatgtatcagcttgacaacacagccttcagtggcttactccccccagctattgctggtctcataaagccaagcgcctatggtgcttcgctgggccctttcatcagcgagatcataacggctgaaggccaacagatactcgacgccgccgttgccgaatgcgccactgcggatatcgcggcgttcttcgaacggtcaatcttcgacactagcttccaaacgctaggcgaaaattttattttcgacccgatcgctcagtcggtactaaagcagaacaccatggctgccaacgaggacgagaccccgacggcgccaacctttgtgtaccacgccacagacgacgaagtcattccttatgccgatgccaagactatggtcaattcctggtgtaactggagtgcaaatgtcaagtttactacttatgccagcggtggtcatgcgaccactgaaatcattgccattcccgatgtcatcaattttgtccaggatgcttttgctggcacgaccgcaggtggctgcaccacgaataccgagcttggtagtattcttaacccacttgctcttggtgtggatcttgagccaattcttgtggagctcattgatgcgctgttcaatctgggcgatcaggactcgaaggtcaagaacgaccccgttggagtgctcggcacaagcctttaagcgaatgctgacatctattatcattggtcctgatgagcgttgagggtttgagccgcaactgtttctgatatgcacatggttattcgctctgccacctttggtgtctttgtttcctttggctaggctttggtatcctttgtgggacattataaccttttctgtcagcacataatgtttctcaccaacaatgagaaggcagacttccgagtcgagcttgtgttgatcaatggaatgaagtccacaggatatgacgttggatcagataacggtgtgacctgccaaaatatagtatggggaaatcttggaagatgtcaaagtactcagatataaaggatccatcagctgcctatacctggctgtctgtagcctccaagtagaacgtcttgatatcacgccttgtaagtcgtgatcaagcgcttatcggttccaggggaccttgccccgggtacggcgatccttgcgaccgtgcatgacacccggcttgtccaacagcctgtttccaggtaaaaggaagttatacaagtgaaaggagaacaggagcctagtttatcaagaagataggcagccaaccccccgtgtttgcatcatctgtgtggcgttctaggctgactaggacactcgagacctgtcgagtcaccggatgtgcgtcacagacgaactatcttcattatcacaccccttctctctctctttctccgcatccacctgctttctcattcttttcttacgagctttatcatatttctctcgcttctctacacccctcacggtgattttatccaactgcatttgcccgtgcggagaagctctagacctgccccgaaggtcccaggccggagtcaaccccagaccacatgctaggcgcccattgtctcattgtgaatcatttagcgtctcagattcaggaacattcttagaagattatcatcaccttctctgttagcatggccctcagtcttggatccatcgctgcccgattgcgttcctgataacagattccggcggtgataacactcatatccagcactccccggtaatgccgttcttacctcttgttcgcatgcatgtcgatggtcgctaaccacggtgtcgcaactagaagaccaccatgcatcaacatccccgatcatcggcggtgccgtctccgccgccaaaccttccacccagaccgacagctcgggacgtccgcagagaacaggaaaccgccccgagctccccaacggtcgatatggggtctaattatgccagggggctggggttagagccgggacctcaaccgtccgagcaggggaggaatgcggcattgggcaaggaggccctgacccggttaaaccagataatatcggtatcgtcattcagatcgcccctctcatggcttatcaggatagctcattgacggctaatctccttttcaacagaactatcacacaaaagccgctttgattatcctacattcacgagttgcactgcctccctcctttaacaagggctccgattctcccagagtcaaccgctgggtatgtttccaagtcatggtcggattcgcgatgctttttgggatatcaaggcacatgaaagtggcaggcgctaactctgtttgtttccctccagttcaatgtcgagttagatgatacagatgtccttcgggaacccctgcgaccttggagaacatgcgatgcaacggacaaccgaccaccacccctcgttatcgaaacgtacttagacacaaagggcctcacaaataatcaaagtctggtgattattgacgagaatgggaagcgttgggatgtgcgtgagtcgcttgcggcgcttcagggtgcccgtgcaaagccataccaatcggaaaatgacgagattatcttggagcggtggaaaatcgaattaggagagtgctccagcaggcctccggcagatttgggctctatcttgccgactgtgtataagaaaagcattgtgctcttccgttccttgttcacctactccaagttcttgcctgcatggagattctctagacgcaacaaaaagttgcgacagagtccggccctccagatcaagtatcgtgtggtagatgggagcgctgctcgtgataacctcccactggatcatttgacagccccgttgagcgagggaagcgaaaaagtggtggacacatacggctttggggtcacggagtcgcccgcaggtcccttctcagttcaagtcacgtatcggacgaactgcgatttccgtgttgatgactcagaagcgctactgagctcgcggtttatgggtgccgacgacgagatctttcgtccgtcgttgccttcagatgatgtcaaccgcccaaatcccgaagtcggttctgtgccagtggagagaagggccgttgagagcccagattgcacacgtgcatacggcagtctctccacctttcatcaggttggcccaacaacaggtgcaagtcctatatcagcactccgtgcaatgagagattcgggcgcgggatctccttcaccgacagagtcacctaagagactcctcccttctgccaaagtccttccttcaggacgtgcggcgcagattgctggtgaaagcggagggtcaagtttcccacgtcgtccctctgtctcattccaacccttcaaagctccccctctgtctgcttccccggctttagcagactctcccctgggaatgtctccccgcaacacgtcacgaatctccacaggtacatctgccgattcccgcgtcatgccgcccctttcttctgccgcttcagcgcgcagacctataaccatcgcatctgaacaagctatatcatcctctaattccgcatcccccaaacctgctccgatatcccgttacagcagttcctttagccaccgacgaggccgcctttccgtagggacaaacagactggaagacgacaactccagtggccgagcgagtgcgacatcatccaatgcacagcccgggtccggcctacttacggaagctacgggcacgagtgcggagtctattcacgcagatgacgagaatatctccgactttttgaagatgcttgattcgaaaaaggatctaatgaattcatccactgcatctcttcaacctggtcctaggcaggcgaaccccaccgcagtagctcttgctcgcttccgcggtatgcgagattcaaatgccgcgttgtccgactcaatgtcacagtctatgcacatgcatcgctcttctctttcttcgagcaagcaattgtcaggggtcccaccgatggttgcgggcacctccgtctccacagcttcttctccgggcaaacccatatctccccacactccccacacgcctgctatacgatctcgtctaagctcgaacagcgttgctgatgacattgagaccgaccaccgttcaagaatccctcgctcgcaccacgatccaccactcgaagaacattccagcgcagaaaatacgcgaggagcttcttctactgcaggggctattgatattccaacatcgccgcggattttcgaccctgcttaccgccgctcgagctccgcagccgtgcgccggccagtcgttaccagcgacgatgatgaaatattcccattcggcatgcgcagcctcagtctgggggccgatgagccctctcacgccaccctagctgccgcccaacagcacactgagtccctgaagagccaacaatcaccggccgagggtcgaagcggtccatcccgctctgcagcgggtccgtatcgggacagtgcatccctccgcggacagatgtctggaccaaccagcgcctcagcctcctccaacccccatgtctaccagccccggttcgccagctcccgtggccgcggctactcgggcggacattccgtcagctcagcatccagcagcctcgcccggggcgccaatcccgcgccgcatctggtggagcgcgaccatgaccgtgatggaaacgccagcggaagcaacagcggcaactccacgttagagatccgccgtggttccgggcagcggccgggcgcggttcggacgctttccggacaagcgcccgaagacgatgagccgctgctcttcgcgatgagcgactttggtgtctcgcggcgcagcctagatgaagttcgacacgggaaccacggtggggctgaatcggctgctgggtcccggcgcgggagtgggagacggggagcagggctcccgggcttccatgtttggtcttgaagtatgagtatacattggcattctaatgatgctttattttggatttctattctatcttaacctcctaggtctcttactcttccccacctccctctcaacatcatcttatacaggcgattgggcctccattcaatttttgacgtttgatttccttttaaaccatttcctacttgcgcggttggctgatttcatagattgaatactccaatcacagattgattactgcgatgtgcatagagattgggtctcgttattgttcggttttgtttcgggcgtttttttttcttgtttatttgtcgttttccttcttctttcttctctgactcctatttttgttttcacttcacttcgcttccgaagttctgggattgctttgctcatttgacatatcccctctctacatgattgatacgacttgatggtttcttgggggccgcgttttctccttatgactatatgattcttgatctatttgatgatgttggtggtttttacttggtagagttatattatctattaaaaaaaaattgaaacactttggattcgtgcaagggagaaaagattgtgcctataacggcaaaatatcacatggaacgattaagcacttccagggggctacatacttatcctgtgcgacatatccgagcccgccgtatttcagcgaaggcttggatagccatctctccgatgctacgcatgctaatggagaaaccgactgctctttgacaccgtcacacttaactagtaggtggccgagaaatggcccaattacttcctccacactccattcgggccggttctactatctaaactattctatacaaagggttaagtttagaccagatcctagctagaatatacccgcgttaagttagaggctctactgagttctaggaagccctaaggaaaacccggcacgtatagttacatatgtaccggataatgcctggcactcgagacctttccctttccgttttagtgctcacctcttgccgctttttgatcactgagtaaaacggagcacgtccctgagtaactagttagttaccctgacttgatcatgggccattatataatcaacgtgatctctgagtaactactgtgccacgtgatcaagtttaccagctgtgctgggctccttgatctccttcttcttcgacaactattgatatcacattctcctgtcggcttacggggagtaactctggaatgaacactataaggccgtccattcctcgtttgtccgctctacttcgcaataaaccgtttcccataccttctccggggctacctttaccgcccggtatactcgttgatgaagagatctcgccggtatacgattccaagtacttctacgcagcgaagcctggagaggtactcgctgatcgttaccaaaccctggttaaggttggctggtatatatcttcaacagtatggctcgtgtgtgatttgtaagggtagtctttaataatttctgtttaattcgaagctctctccatctctaataaatatataggtatatcgaaaagccagggagtgttatagtactaaaaatcgctaataacaatgcgagttccgctagtcatgagcgtgggattaaagagcacatttccaccgcagacccgtcacaccgaggccgctcacttatccgaatatctttagactcttttgaagttaaaggtccagaaggttcttatttgtgtcttatatatccgcctataagggagccattgtccatatatcagcggcgcttcgaggatagaaagataccactgcccctcattaaaacatacattcgtactcttcttacagggcttgattatctttataaagaatgcaggatagtttatacaggtaagttcatccttagccttatatcctgtcggtgatactaagcccaggcggcggcctagatctaaagcttaaaaacatcatggtctcattcgaggatccaaccgtacttactgatttcatgaattctgagctcgaaaaacaatggctttcaagattgatccgacgggacgacaagtatatcagtcccgtaatgacttcgggccacttaaaagcctgagaagtataccacagcttatcgactttggcttggcaaccagactcgaggaagacgacgactggggcatctggcctattcagccagaccactatcgggcgccagaggtgataacaggtaatggatagcgaatgcctacggatatttggaatcttggtgttctagtacgtcccgcttttctctaaagttgttattatccactaatgccggaccagttgtgggatatgatcgaaggaaaagagctatttcggcatatccatgatcaacaaggtcgttacgatgctaaactacacctcgccgaaatgatagctttactcggtccaccccctccagaggtcatacaaaggtatcaatatatgcgagagtactcgtggccggaacctgtcagacgagaagacgacagagtatgcgagatcgcggaggagtacttctgcggcccattctttgacagtaatggtatcactaggtttcctatcttgaacgaattattcttagactcacgaaatatcttaggtcgctttctttacgaagacctgatccccgaccggaaactatacgacacagtttccttccttgaaggagaggagagggaatcgtttctggatctcgccaagggaatgcttgtctggcatccagatgcgagaaaaacggcaggcgaactggcggggcatccttttcttcaaccaaaacagacaagcgcctgattgctgcgagcgtttgctagcggaatgactcaaaatcgtggttgatcccagttcggcggttccatcaaatggtcagttgaagcgttaacgtagttgtctttttgaatgacatctaatagagtcagttgatctgtttttgatcggaaagtaatagcattatgccttaaatgggatcgaagacatcgaattaaatcaaataaatcaaattcccaaggtacccccaaaggggtatcacacccgttgaacattcgcgcgagcaacagaggaacagggtgaataaatcaattaaattaatggattgaagtccagaccctccatagcaggcagcctcctaaggaaacccggtacgtatagttacatatggattgctattgtatgtaaatgcacctaaacgctgacatcacattgtaagctcgtaccttccgtataaactatcgcctccctgtatgtaggtagtctgtggaatgccctatttgcctatttaatacgcgtcacagctatataagcagctcctttacttgtttgtagagaatcaactcttcttctctttccctccttcgctctctgagcgtcttaacatagttacgaacttcacatcaacaatcattcgcacaacaaaatgtttgatagaaccatctgttgctctttcttgcttttggctctgtctagtaagtttgacctcagcttgatcctattttgacctgattttgacctctcttttagctgcaatggtgattcgagaggagggggtcgagtccctagtggcgaaactcgtccgcctggctgaagagaagagaagggtgattgagtgatgagcaacgtggccagcaatctcatctggatgatcgttgtctgcgctgcggccctatagcgcattgaatttctcttactggacattgcggagattgttcgaccggtatgtcgctgtgtcccatgcacataatcttgcccgcatcgaattgtgaagttattctcacttcctcgatatcaccggacatccagctcaccagattccttttcagttggccctcactagagtatcagcccgctgcaatctcacctcggtagcgcacatctgaatgttttgtgtaaggtacacgactaacatatacatatctagaccagctcgttaaccagatgagggataacaaggctgtctaaggtatcttatctatatatacgctcagagctggtgaccgacgcagggattttctgacgctgacagaagagactttgatcctctgtgaaaaggaaactaattaccaaacaacgcgatatcatctttgaatggacagacaatcatcgtctcgcccaacgagtccctcgaaacaaacaggtgcagcgggaagacatctggcagctagctgcttagcacggtgctcgggcagatattgcccatctggcagatattgcacacttcagcaaggtgcggtaggagctctatgggactgtgattaccgattcgggcgcgctttcccctacagaagcggagtccaggagacccccggagcccgccgttgaaggatcgccgatatggattttctcgagaggattgaccttgttcatacgataaaccatcaccttctgggtttcttttcattttaaactatgatatactcgctgccaagcgacatcggcgtcgggagcgatgttaatatacgaagtaagtgataagacttgcgagtccactcaaaatatttgattctcgggagttgactgagcgtgttcgctggtaaggtttaaaaggcgaggtctcatgttagtttgaacgtacacttcataccttgtattggcctgtgctaagtagaggctcacttaaatcataggtagcagagagatatgaaaaggaaaaacaagtgacttcgttacggatcatgggcattccatggagacatctaaatacattgaacatccgatttttttaccctgctagcatacctcaacttaacacgcttatgcgatgtaggtcgaggccgacacgtcaccaccacggccggtccagttaacgtggatatccttgccctcggggaaggtctcgctggcatcctcgggcttgatgcggaaagtgtgggcaccgaagtagtcacgctgggcctggagcaggttggcgggcaagttcttggagcggtaaccgtcgtagaaggcgagcgcagtggagaaggccggagcagggataccccacaaagcggtcttgctgatcacgtgacgccagccagtctgggcgttgttaatggccttgttgaagaagtcgtcgaacagcaggttctcaaggtcggggttgctgcggtaggccttggtaatatccttaaggaagacggagcggatgatgcagccaccgcgccacatgagtgcaatggaaggcttgttcagcttccacttgtactccttggcagcctatattggggacgagggttagaaaaccgactatcagtagcggataaaaaagacttacgttctggatgagcatgaagccctgggcgtaggagataatcttggaagcgtacagggcctgctcaaggtcgtcgatgaaagcctgcttgtcgccctcgaacttgggtgtggggccgctcaggatggtgctggcacggccacgctcgtccttgagagcactgaggcagcgggagaagacggcctcaccgatcagggtaacgggcatgccgaggtccagagcgttgatggcggtccacttgccggtacccttctggccagccttgtcgaggatcttgtcaacgaggggagtgccatcgttgtcattgtagtagaggatatcacgggtgatctcgaccaggaaagagtcgagaacaccgctgttccacttggcgaaaacatcaccaatctccttggaggagagaccgacaccgcgcttcaggatatcgtaggcctagatgacgtcagtgatcgctcgagaatatcttgcagcttgagaaggtagccttacctcgcagatcagctgcatatcaccgtactcaataccgttgtggaccatcttaacgtagtgaccggaaccctcgtcaccgacccagtcacagcaggcctcgccgtcgctcttggcagcgatgctctggaaaatgtccttaatgtggggccaagcggcctcgttaccaccgggcatgagagagggtccgtaacgggcaccctcctcaccaccggagacaccgctgccgacgaagctgatgcccttgccgttgaggtattgagtacggcggttgctgtcggggaagtgggagttaccaccgtcaatgatgatatcacccttctcgaggaaaggcaaaagggcctcgatgaagtcatcaacgggcttgccagccatgacgaggagcatgatacggcgggggcgcttgagcttggcgcagaactcttggatggagtgagcaccaatgatggacttgcctgttttgtagtgagcattttttgcaacggccattggaacctgttattctctggattgcttacccttagcctcgttcgccaagaagtggtcaaccttggagacggtgcggttgaaagcgcagacggtgaagccgtgatcagcaacgttcaggatgaggttctggcccataacggccagaccgatgaggccgaagtcagcactaggagcaaagtgcgccggagcaccgacattgatgccggcgagacgggcgctatcgtcagcgaacaatgtctcttgtcaacagatgggtaaaaaaatgacaatgggagcaaaagagaaaggaaagccgtgctcttctgaaaaaagatcagattcgcagtagctccattggtatcatcttgcgcgagcacctatagggattgggtcttccagatagagctgttgcatgatgtctgagcagcattgaagatccatgcgctctgttatccgtcgggaggcgtaaccgctgggctggaattggtgaaatggggaggaaagaaagatgacttacacagcttggtcagccatgacgattatatgtgagatatgatattgattaaaaaaacggtgaatctagagaagagaggaagatgaagagagagaggaggggaagaagaagaagtagctcggctgacggagcaagtcttccgtcatcctgtgggacataccgggggtaccgtgtaccagcgtggttcttactgtctccggtgtagcgccaagtactaagtacaggagcagagtcgtccggtgtcaacccactcgggttctgcgacaatttggaaagcattatccgacccggtttcaattccctatatgctacgtacatcctctgttggatttccggtttacacagctttatagtacatggcattgtagcttttactctgcaagagcggggcatggaggggtagcttggaactgaagaatgttatataacatagcaagtgtatagtaaggtatcaagcagatgatgaagtagcagaaactcaacccaatccccatgtaagtcacctaaaccatccacacatcccatcccaccattttccacgcatcggtgaactgttctggttgcgacggagaaatcacttgccgatgagttcataaccggctgcacatgggctaggccgctttgggactagagtgggggttacagcgcccacaacggcaatgactcagcaagagggctgggggggcttatgtcatagctgagtcaggaaagcttggttgagtcatgtgacacagccatcgcagacggcctggccagcgcatagacagagaagccatttctcatctctcggattttccattaagcgttgccatcccgcctaatatttcacgacgcgcatttttataatccttcaggccacttacagtgactataagcggcggaacctttcacctcttgcaagtgctcatctttcgggtgcctatctcaagcgtgacggtcagtcaggccctgaaggtacgttgcggttgctacttcgcatctagcattctcgtctctccatctctcgcatctcatttctctctcccccccccatttgaatatcccattcatcatgtcccttccgcctcctccaggtctcaaacagactccctcgtcacttccgccccgcccacctccatcctccaatgccgcgcagcctcccaccgccaatcctgcaggctatggcgggagaacccgaccannnnnnnnnnnnnnnnnnnnnnnnnnnnnnnnnnnnnnnnnnnnnnnnnnnnnnnnnnnnnnnnnnnnnnnnnnnnnnnnnnnnnnnnnnnnnnnnnnnnnnnnnnnnnnnnnnnnnnnnnnnnnnnnnnnnnnnnnnnnnnnnnnnnnnnnnnnnnnnnnnnnnnnnnnnnnnnnnnnnnnnnnnnnnnnnnnnnnnnnnnnnnnnnnnnnnnnnnnnnnnnnnnnnnnnnnnnnnnnnnnnnnnnnnnnnnnnnnnnnnnnnnnnnnnnnnnnnnnnnnnnnnnnnnnnnnnnnnnnnnnnnnnnnnnnnnnnnnnnnnnnnnnnnnnngccgtcacggcgtcccagccgcgcgcggtagcctccagtcaaccgcgtcgccccaacaactactcggtcgcgaatccgccagtctctgctggatacgcaacccccgtcaagagctacgtcaatcaatatcaacaacctcagacataccaaagtgggccttcctactatggacaacctcaatacgctgaaaacacatacggcccgaccgtcccacatattacgaacccgttcggatctacgcccaatacagggttttcacagggtggcaacgcccccggatttgacgcagagacggaagctcaaatcgcgcagtggcagagcgcctacaataggcccaccgatgaccccaagaatcaaggcaaccagccgggttcaggcgtgaacacgggagctggaaccccaaccctcggcgctggcactcctgcccagcaggccgagtcacaaaaaacagttattcgctctggtggtggtcagacatggaccgactcgaccctattggagtgggacccggcacatttccgactttttgtgggtaacctcgcaggtgaagtgacggatgagtctttactgaaggcattcgcctcctacacatcggtccagaaagctcgtgtcgtccgagagaaacgaacccagaagagcttaggctatgggttcgtcagtttcagtggaagtgacgactacttcaaagcggcacgagaaatgcatggcaagtacattggttcgcacccaatcctactgcgccgagcggtaaccgaggttcgcccaacttcggcccccaagcatggaaagcatggaaagaaacaaggcaagggcaagggtcctaagggagacaacgccggtggcgcaggtggaaaagtgaagcaggacggtatcaaaaagccagccaaaacgaagggaggattgaagattctgggttaattatatggatacgccgtttacgtgaagaccgatagtacattttcatggcaagactaaagatgctttcctgttgccaaatgtactattactgaaaaaaattcgaaatatcaaaaccaatttcgttctcgagtaaaagggggctgagtcacgtgaatatacttgtggcctacacttgccatcatcatctctattgcgctggacttgtccttccaagatactaggtatatctcattgagaatctgaacagagggctttcctgatatatttctagcctgctcataatacccttacaatatacggagtgtcttgggtacctaaccacagtatgtggttagtacattggcattgagttccccagcccctctaaaagcacatggctggggaaaaaaaagctctgtttaaaaccaattcacattccagctgaccccatcttctccatatcttctttctcacattcttctgatctataattttccattttcctccaagaaaaaagaggcttgtgtgttgcaagaaccagccggacgaggctgtatacttccgtatacagatcccacccaacgcattgctgcccacctgtacacggcctacgaccttgaactccacgtcttgttttatttttacctatcctcctaccggattgacaagcaacgactgaagctctctacacatctcgccaaataatatacctctctaccacccaagatggtccagcgcaacatcaccatcgcgattatcatcatcatcctcttcctcctcctcgcaatcgctggattcgccatctgggctgtacaaagccacgtctccttcttctccaggaagaaggagaccgatgcagagagtgcggatggctgataaagcagggtagcatgcagcagcaagcactacaacatatacacccttgacgctcggcctcgggcctctcttggtctcgcttttacaggcattaattgcctcttttctttttcggaatacgcacatatacataccatcacgatcacacacacatctacgactacgaccttatctgcgatacgataccctttctgttggcattcaatactaccacccacgatgacgagctgcgttacgagtctttcacgttggaacacgcctttttttgtacaattgttagcgattggaagcaatcagtacatacgttgctttcggtgtattttcttctttttctttttttggttttttagtgtggagttagaggtcttttgctgagtccttttcttttcttggatgtatttgacgaggactgcattgatgcatattcttcgctttgttgaaacccatggtgcatatttccattgacagtttgaaaatatcccaatttgacaaaatttcggaacaacatcgatctatctcacatcttttcgaagccatataagaagggaatgcctaggtagtgtcccaaggatacagatcgtagatgtaaagatatgtccatcgatattttaagaagtatgattccgacttctcgatacttagacaaccatgtacaataaacaaggggaattcaaatgcactgcctcccagggtatacatatctacccaaactaggtaataaaacatcccatcaccgaaaaagctgtaacatacatgaaatcccaagtagatagagcaaccataacgccccagtaataagatatcatctcgctcaaaaaacataactcaaaagctcttgtgcgcgaagagctgtggcaacatgccaaggcagtgtgttgttttgtacactgcatatgcccttggcccgggcaagacagcccaggtcccggtacatacttaaggtatctttcaggacgctgtcgtgagatacgggaatacgtggggaataaatgagattaacggaggtagcaaatacaccgtccgcatcagtagtgcccttgcggcgaaggagatacccgctggatagggcgggtcggaattcggtgaggtgtggagagctgttgagtcggtgggataggatggctagccaggaatcgtcgcagatatcagtgagaacagtttctgaatcggtttcgagtgacatatccgttggcgtgggggcactataggcggcgggaccggcgctggttggcgtggctgcattgcctgattgttcgggggaagcaacgctggcatttggattaggagtcgacacgggggtagacgaagacagtatattcagcatcgccatcgatacgggtggaaccggtggctcaaggatcaagtcaggaacagtgttgacagccagaatggtcaattccaatgacccaggctttgacttgttgtgctggtctgctagactagcccaggctgtgaatgtgttagcgatatgtcctcgatatcaaaaaaaaaaatacgaagcagtaccttcaacctcctcggtttccatgggctcggtagtcgctagctgaactttccatcgtgcttggaatttctccataatgtgtttcgtcgtagcccaaatctcattccttacttcggaaacaggtctggtaccacccgactgacgataccgcagacagtaagacatggttctttgaatagagcctggcaaatcggaccatgccaccgatatccagcgttgatcaagacttttggagtaggcaatgtgaagacttcggccatcttgaagcggcgaggatctttcaggagcaagtcggaaacttatggctctcggaatggcgtcggccaaaagcattggtggcgcacagagcagggggctcatctccgcatcattggagcgacatcgactgtagacttctaaggccaaattcaaataatccacctggggaggtataaccatcgtttcgcttgacatcacgaactctaggggaattatctgcagaacaagctcgttggcaattcgagtctgtcgtcgttcggaaccggctaccaattgttggaaaaggtaccagaaggcggaacaaatgtcagccaatgctgcagcgtgcgtaaatgggttgataatatagacaacatggttatcagcagttgccgtagactgtgagagctctgagccttgggaattgttagtaaagcacataatcatcagagaaaacacataccaagctgctcgcatgttctcttcaatacctgcatcatagattcatagctagatgtttcagatttccatagcttcagcccctcttcgaatgctacagaatcgtctcctctggtatgagttccaagactgcaactttggtagagcagaccaaaccgcctcaagaaaacatccgctgccgttgacgcagctggtgggtgaatacaataagcagaaatgttctttggcccatgagcaggctcaagaccgaatgtctcccaaaaggatacagccgggggaagcgcctctaagtattctttacctcgacgcacacgtatatgaggcgccgataactttgaaatgaagctttttggggggtctttgggcagcgcctgatgttgtggcggttgctgctgtggaagattcgcgacaaattcatcctgaaatgacgtatattttttgaagtccattctcgaggtctcgcccaagagtgctgtgtcgtcgagggcttgcagtgacaaagactcgctctcgagatcaaaaagaccaattttcccatcaagtggatgcttgagggaggactgcgtaatttggtcaaccagaagttgggcaatttcaagttgaccttcatggcgaggaagaacagggagttgttgaggtgggaaagcagagaaataaccggtgagggtccaatcggaaaaattagctagaaaattgccgaggaacgtagagttctcggctgcgtacgcaggatttgcttctgtgccaggaaatgacttctcttgggatgcaactgacattatatcggattctgaaggagctcgtttccgcttcaaagaggggatcgagggcatggctgccggcgttggaacatgctccgacatgatctcgatactatcgtcgctgctgtcactgctcaccgaggctgatcgtagaccattttctgactgaatcagagatagactggtcttgttacgttcttttgagctaggtacgttggcgttgcttctgtcacggcgaggaatgccaatcgtgggtatggcagatgtctgatttaatgtgtccaacgagttaccaccggagaaccagaatttgccagctgctccgtacttccgatcccaatcaccaagtttcttttcgaatgccactgggtggtaatgcccttgcccccggtgacccgtaggctgtcgacgatcgtctgcctcagaccccgggaacaatatcttcttcacttctactgggctcaagggcgggctgattgtttgacctgcgcgatccataggcgaatgagctgattcttcgggggccatgggccgttcagataactgtggtgattcgtggtgtatcggagaggcgtgtacctcatgggtttccaaatgagttgggatttcccgtgactgattgggggagagctctgcatcaaccatggcctcggcctccgattcgctttgaggacggggtgcttcaactgcttcatctgcatcctctacccgagagtcaccctccatgccatcgaaatcagggtcatcgaaaaagctgaagtccgcatcggtgatacctttcgacccaaaatctctttcgttcatttccccaaagagatcttcttcgtcgcttgcatcatatcggccagtgccaattccaacgccactattttgaacgggtgatatattagatcctggcacatttcttcttgaatttcgttgcgttgcatgtggtagcccgaagtcagaatcgtcggcaaaagcctcaggagggtttggattgttcaacccgactgctgcagctccgtctgggggcgttggatagacaagattcatggtttgcaaatcaggatattgcgcaattcgggataaactctctgtggtttccaagggttcggccttgggtggtgatgccatttcttggtcttttggtcgtgagtcttgggtggtaggggtgttttgagcaatatgggaaatatgatctagcttgagagagctcgccattgtagaccattgctctgcaaaatctagaggttcgtcaagaagggaagtttgagcatcggaagagaaatttgatgagctagcccttctgaagcaaaatctcgctggccacagcatgcgtttcagtggcagtgcagattgactatcatcactctgtcgccatgcttccccagcaagcctcgcgaaaaatggctcccaaacctccacttcaacccagggttcttcatcaattgagtcaacatgtaacccaaaattccgcagccactgcacaacatccaatttccactgtattcttttcgcagacagattcccaggggtggggtggcccagagagggaacggttggcgagtcaatattagccgtgacaagtctagcgatagtcccgctcgggcatagccaaagatcaattccaggctgaacgtcggttattttagaaatgtcgtcgcgtggactgcacagtcgagttatgcccgtttgggatacagtctgggcggagacagttattgttccacttatagttaactgaacattgagtgtagtcaagcaagaagtggagaggatgctctcattgttgatatgggggctttcgtatcctgacttttcgatggcagtgaaaagggttcgtgatccgaggggcagagcaccatggcgtctaatcaactggaggctaattgaaccggtgacagcagatacaaaggaggcataaatggccgctgaactgctgtaaccatcttgtcgtcgagaggtaggctggctctgatgtggccgtggctgtgccgcgggttgggtaccgttctgactctgattgtcggacgacagccccttcactaagtccagcgaggagacacttcccaatgcagagactattgtaataaaattaacaaggccccgaataagtctacgagctggccagagacttacctttcaaagttgtggtaccaacgacgatcttatttgactctgtgtcacttcccctcacatacaaaggtttgaggctctcgaactcgggagtgggggaaaacacccaaagccccaggcgccttggacatgaggccaggcagttcaaacccctcaatcgagcctctaaatctttgagacgactcaagtgcttgagaatagtgtagccattggcggggctctcttgtgggttatttgtgataccagcttcttctgtgtatattctccagtagatgttggagaatccatcctgatgtgacgcgtcagcatggacgcgaatgtactgtaaatattacgatactcacaataagatgtatgttggtgtttgcgccgccagggaagtccataatttaacggtcgcggacagccccggaagcttttaaagatagaagaaattccgatggctgactctggaagtcatttccaatcgcaggttgcatggtctgtgggaaggagtgaaagcgcatagcagagagatcggaaagcagcgaatacattagctgattgataccatattgcgcgggacgaagtgatcaacaaagactaaaaaggtctggcaaaacactgtctctcaaattaaatcagcgcaccaaatgaagcagcaaatctttcaaccacaaggcttatcgcatgaagccaacagaaagttgagatgcgtaattccgggggacgttcgccagggacactcgggccaatcaccaggcccatgtatcacgtgattgctatcagtggcttttatcgcagtttttttttttatcttttgcaggtctgctttcgccgacaccgataggttgcaaacaagttgcagatcagctcaacataactggctcggccttccttacactagaatataccagcatgaagctgtccaacccgtccgaggtcccggtatataccatctcgggttccgacagtgctcgcccgcttcccgaatggcttgctagacggcgcaagcgcagcttgaaaaatgaccccgagtatgccaatcgagttgaattactgcaagactttgaatttgaggaagcaagtcattgtatccgagtcagtgaggatggagattgggtcatgagcacaggttcgtactaatccccatcttttcctgagagcgcatacctaacactattatttgcaggaacttacaagccacaaatccacacccactaccttccgcaattatctctctcatgggcgcgtcatactagttcgctcaacaccacgttcatcctactgtcctccgattacaccaagtccctccacctccagtctgatcgatctctcgagttccacactccctcgggctgtcactacactaccagacttccccgatatggacgtgaccttgtctacgaccgccagtcgactgaagtgcttgttcctgcagtcggtgttaatcaagatggcatgggagaggtataccgattgaacttggagttgggacgatacatgcggagttttgaggttgacgtcggaggtgacgattttacatccactggtggcggaactctccaaggtggaatcaacacgggagcggtcaacactggtgctattgcggagcagagccacaatttgttggccttcggaacttcattgggaacagttgagctatgggatcctagagccaagggacgtgcaggtgtgctgtctacacccacacaacttggactacacgatgggcgatcagagatcacagctctagatttcaatcgctccggaatgagcctcggaaccggctcgtctaatggtctaattcacctctacgacttgcgttcacccgttcccttccaggtcaaggaccaaggatacgggttccctattcacactctccaattcctcgagccgtcatctgcaacacaagctgcgacaatcgaaccgaaattgctttcatccgataagcgcatcatcaaactctgggacatcgaagatcaaaaaccttggacttctgttgaaccggctgtggatatcaactctgttgcttggtgcaaggatagcggcatgctcctcacagccaacgaaggccgacagcaacactcattcttcattccgcagcttggccccgcgccaaaatggtgctcattcttggacaacctggttgaagaaatggccgaggatccaaatgaccccagcgcattcaagtctgctcagtctggttctgtctggcccggtttcacgcttgtgcccagtgaagaggtcgccaaatgggacgccaagctcatcaaggcaggcggagatcccattgatttggcagcttacatgcagtcaggaaagatggtaccttactctaagggttatcaagtgtcgaactttgtttataactctattacttcgttgttccccgacacagaaaaccctagagcgaagaaggtggctgagattatgaacaaggagcgggagagccgcatccgcggcaagaagaaggttgctgtcaaggtgaacaggagactggccgagaggatgttgaacgcggaggagaagagggagcgcaagcatgccaaacgtctattggaaggctcgggcgaccaggaaatggtcgatgctgctgcaactggcgaggacaaggtgttgggtggtggccgtttcgcccagctgttcgaggaccaagatttcgctgtcgacgagacttcacgcgaattccagttgctgaaccccagtacggttccccaggccgctgccccatcagcttcgagaaaggagcgtggcttgacggcagtcgagcaagaagccatcgacgaagtgcctggctcaagctccgactccgattccgacaacgaagcggaaaagcccgtgaaggcagcagtctccaaaaagatttcttctgcagactacaagcggacgaagcggcctccgcctcgtatgcaagtatcttcctcgaatcaagccaattccacccgagaccgctcctttggctctcgtgcacagaatatgaagtcgaaacaaaagcctgcacgacgggttggtgtagtcggcgagcaagagatgagcttcaacccggccgggaagccgaagcgcgctgcccccgaagtgcgctacgacaagaccgacacatcgttccgagccaaggaacgccgcagtgcttcgggcaacactttccgcaagatataatatgtcttgccattattggtctttttttatgccatttccttgacaccatacaatcttgtccagccaggttttctcgcctcaggtctacgaatcatgctcctagcttctttgcctcccacttattggcaattaaaggcttacttgctggcgcagctgtccgcttctggctgaactactgccgaacactaggactgagctcattgacaacctttattgcttccatgcaattaggcgttgtgcgacgtgctgctgtgttgatccccgggacgcatttctttgaacctacggcaactttaacaataccctattttatttgcacactgcctcaccgtcatagacggctttggtgtgacgcccgagaagaaaaagctctggcacatatcttcgaacgaccactttgtatctaatgtctcaaaagcgatgccaaaacaatcttgtatattcagctgtctttgtcactttgtttttcgtaataccctgagtaccaacgtgattgtggtagagaacagtatatctctcatggacaactatctcctttgaggaggtgggttcgagtgcatattgaccctcctacaataagtttcataattcacaacttacaatttagatactttccttgtgaatatttagaattggtactttagttacaactgtttgttatggactggaggggcaatacccacataccagcaatacagattgactacgtactttagaaattggaccaatgaacaatgcaatggtaaaagtttccaaccctatatcatgaggtgtttatctcgacactctgtccatgataaaatcgctggaggatgtcgtgatttatgttattttatagatcgttgcctgaggcgacgatgaagtaatcgaatattagcactaagcctaaaagggcattcgtgcaacgtcgaccctgccatctaatcgcgagcccccaagcccattgtttttccataaattcctggtttgggcgtggtgcttgttttctgttctcgtcttttggggttgtgccagtttgcctgctccgcttgagccacgctcgtttctcaacagaagagccgattgacagcaccgtccagcccctctaccaacaattcggggtgcagtagctcctcgcagggcaagccgacttcaacgtgtgccgatctgcttccaatgtcctgaccccatcataggatctgactattgcactataaacagtcaacggcactgtctttcacctgggggatcagcctactgtggtctccgagcagctcacacgtggaggctagagctataggtctatggcggagaacaagcgccaggtttcagtaaaggcctctgcgcagaaacaatctggtaacgcagcaggcccagggatggcgacacccatcgtggccttggaggcagcgctgagcggggcgatcggtgcccggtgagtcttatctgccaacgatggtgtctacaaagtcgcagcgctgacctattccgttctcgcgttcctagagtgcgtatttctacatcgcagccgaatcaatccactttcgaaggtacactgttcacggcatgcccgatcaccaacctcgtggccatcaacacggcccccgcacccaaccctggtgatgccaaacaggcgcagaacggcgactaccacgtgatccccatctcgcgcatccagcacttccagctcctcgctctggctccgccctcgaattccagctcgtcctcgttcaccgacgcacaacccacgattcaggcactcgacacccgtgcgctcaaggcccgcgagtccaaggccatcggtgaagcgcttgaccgtgaggcgcgtcgtggtaagggcgtcactactcaggcccaggacctatttgatgctttcagccgcactatgccggcgcgatggaacggccacagcatcatcgtcgccgatgctgtgacaattgctgctccttaccgcgttgatgattgccgttcgattgcggagggcgatacggctgctcttaatcgagtgcgcaaagtggtaggttatctaatatactcagtcatcaatcgcaaaacaaatcgagttaacactgtggaatatagctcgagatggagcgcaagaagatcgagcttcgcaatgccagcgctactatcggttcgactagcaccttctctcgccaccccagtgtccccaacgaccagcgcaaaggtggctaatgtgctcaatcacagaaataccagagacgcagtcctatgaaattgtagataggtctgacgtcgattcgagcgtcttggtggcgcctgatcagcaaagttaatggaaatacccaagcgaaaaacgacattgcaatgggatagagatgatttgaaagcggatccgacgggacactgcgcgttcttgaccacttgtgtctgggagaagatgccccccccttatcaagaaactatatgccgtggaccagcattgcgcgggctctgcttgccgtcgagttggaccgttgcattgctgccaaccgaattgccttgtgtcttgtttttgggcagtcggtgcgctcaagccaagaatacgagacaatccatagtaacctagtcaattgctacgacaacactttcttaggacaatgatattgcacccttcagccactgaaacttctgtaatgtgtcttatttcgacaactgctagcgacgacgaacttcaaatattggcaaacatgataatgaaatgaaaataaacccgctatgaagattgaaagctagatggttggtcgaaggctcgaaaagacgctcataaaaaatagagaagaagtatgtcatcaattgccgcgagatatttgcaagactttagtctagctctccgcaactggaactctcccaggaacaatctcacagacagtccccacaaacccttctaaacccgacatggacagcgtcccagaagcagagctagaaccaggcgcagacgctaccgtagccccagaatgggacggggcagaggccatggaaacaccaggcataacgagaacctgagagccaagttccacccattcaacagacgacaccagcgcaaaggtaatcttgacgtcttctttcagggcttctgcggaagaagcagctccgacaatggaagcagacgaaatgccagacactactttgctgatatctgttgccgagggacggcggcgaagtacatcacgtgcgccgccctcggtattgcttggtatcgcactgccgtttgatttctcactaggggaatgaggatcgccgtcaaagctgaagaattcaggttctgacggggaacccggttcggaagatatgtcctcgcctggcccagttaacgccatgcaaatgacacggacggtagctcggatattggcgatgtaggcaatggcgttaccgccaagcaagagtggaggtgaatttggagccgagaactcagtggaccggaaggtagcggtaaagcccgtgtgaaaggggagcgctagtaacgaggtaccattcgagtgcgagtgtgggtcgtggaagttcgagagaatcatgcccttgcggatccggccgaaacgcggtagacggccatcgtctgaaaccccgatgggttcgattccgatggttccgacttggtctctaattaggcggcggacaggaagccggaggtctcttacgctgacaacgcggatacgctgccatcttgcttgggaatctttaccggacaaggaagtctgcgggaaggaggccgggaaatcacccggcgggccgggcccactgcgggacagtgacccttcgggtggttggggctcattgcctagatcgtttggaacgtccactaagatggggccaatgaccatttcgtcgccgatggaaatattcccgcgccggactaggccgcagagaaccatgccgcggttctcttggccgcccttctccgagtccagtgaatagactttggagggagggattgcaaacacttcatccacatcgaagatattagtggggctgtgggagggtattggcggccctttagggatgtggagagttctttgggagggtcgtgggggaatgggaagagagcggaggaaggcatggagttttccaatgccagtgccatccacagcactggtaagcatgataggtacggtatatgcccattttccatcagccgccgcgcatactttctgtacttgggcgctgtccaacgtgctgacttgctgaaggtcaagtggtttgtcacctgcaggcgatgcaggtagcattgcaggttggcgcccagctgttttaagcgcagaaagaactcttccaaggctatcccgtagtccactgcgggaagcaacgtccaatttggtgatgacaatcaacacaggaacctccaactttaggcaaagctctagatatgacagacacgtatcaatttccgattgttcagttcctgtctgttcgctgccagatgtctcattgccacagttggctggaatgcataacatcacataatgtggagcccagctgataagccctcgcagggtagatttcaaatatcgaatagagcccggtagatcggacacaaaagccaaacgacctcccttcgaggcggcatgaatatcatcccaacccgcaacattaccggaagcatagttaatcacggttggtggcatctcacccgtgtacccaatcagttcttgggcgaccgaactggtgatgcccgatgatatttcatgtcgatgcttgagcaggcttaatctgcttttgcctcttccgttgtcaagcgcagacgaagtcaacgtacccagtaaggaagtctttcctgcggtgcttggacctgcgagagaaattcgaatctgctctgtatgggagtaatcctcattcatgactgactttctgccagattctgggtgtgcggcagatttcgtatcgttcttggacttggttggagagatattgtagaagtccaggtcgggactcaccagagcctcggcgacccaaagactttcagtgttgttcttggtttggttcccagtttcagatggcaagtcttcaacccattcacactccccaaccacaactcggcgaaggatctcaactttacacccaatactagcagccatagcccgtagattggtcacactctcgtccaactcatcctgcgtgaggcctacgaaagtaccatcatcgccgacaccgatctcatacaaagcaccttggctttcttcaagaccgggaagcaagcgggccggtttagagggcacacccaattccagggctgcctcgggaagaacaggcaccacaaggttagaggtagtggatgagtgaaaaggtgacgattgttgcaaacgccataatagctgggtagtcaacccttgtagtcgttgatggcggctctggctagacttggcttgcgtgtgtcttggggttggttccaagctcggagaggatggagtagacgtacttggcatgacgcggtaattgtgatggtacgaacccgctattacatgcccagtcgacattgagagatacgggcgcctggctcgaagaagaaggtgcaatttgtactcagtgggaccctcttggggttcgggttccaatttggatattccatagttggataacaagtcagcgtcgacgcctagtggactggtgctagaacgcgtgcggacagctaaaccccgactggcagatacattgatttggggagtcgatgatcccgaagttgaccacggggacgacacccgaggtgggtcaggatcataggtgaatatggatgccatagacacggttacgattcagactggtaacaaagatattggtaataagcaaagatatggagatagataaagcaattctaaaaagactcgagaaacataaggcattcttgcagcagaattgaatgatctgtgatgcaaaagtgctgtaactgactcacaaatggcacgggccgaagcatcacgtggcccatgtttgtcccgtatttacccagcgccaagaaattgtatgagaagttctatcaagacatcaagccttttctctcagagaattttttggcctccccaaatatacatgcataataagcaaatccagtcccgctatagccaagcgccttcgctttaacgccgaaatcaaaagtgtgcatatgctctactcagcagatgaatctctgcctgagcttttacacttgccctgcccaacatggatattgcgtgctgtcgtacgtgtaaataccgcaccgcatattgggcattcagccttagccaccactcctgacttttctcgctggtggcggagaagattgctgaatgttgagaactcacggccattgcagccatggtcccagcattgtggtcgggggcgcaagctggatactcctgctggacggtcagaatcagtagcggcggctgattctggtgaagagtacattggttcggggaccatcgattgtggctgagagctgatggaggtagggtgcgatctagtgtggtttccggtcagcatactctatgattcgggttcatcgtctcaactcacggcatgtccggtgtagcggggaagtagtaggcatgttggtttatcatataagcggaaggactacccctgcgttagctgccagatcattggatcttttatacttcgagcggttcatccgacatacgatgtcatgagaggctgttcggactgaggagtgacggaagcagattgagggtggaagggatgggggagaggtgaactaaaactggaaatgtcagtcttttcagaggccaggtaatcaatcggcttaccttcgaggttcactgtgacgggaaggtgcgagataagacgccggtaattggtgttcttgctgttggtacccatgcagaggcccatttgggtgattgggatagcccatcggatagcccgatgcagggtatgacggatgtgaagatagaaatggcgggctcgtctgttctggttgcgaaggttgataaggtcggtttgtccacgcatattctagaagtgtcagtagatcatcttttaaacaacgtctgggtgaacttcgtacggcgagtattttgctgcactgggccagcaaaataagagtctggtactactgacatggggtatgatggaatgccaaggctgttgagggatgccctagtcagcactgaatctggccctgggggccgtttttctcatggattagctcgacatactgtgaatcttctgtgccaatttcttctttagtcggagatttatcctcgatatagccctgcgctgtggactctgtaggtggatagttcgaatctagagtgtgaagcggactcgtgctggtattcagcgttgttgaatgatgcgcgggcagtgacagtgcaaatccttgtgttgactgcgagccacccggtgcataaatcgagttctgaatatgctgaatgggccagtgagactctggtccgggaacgctgtgtgaaaagtcgggagattccactgactggactagtggagacaaaagtccaacgttcgattgcgaagctgtgaatggtagatttgattgattcctgcgggaagagaatggatgctgtgagccagatccttcgggaaacattaggaactatataggtcgcagaccagtgagattgcaagtactgcggtagggggtgggaggggccaaggttgagtataaggggaaaggtgggactcgtaagaggaagtcgacgtacaggtttgaagttccgatccgattattccctggtggtaaatcaaaagcggttttttctgtgaggacttcaattgggggcacggaacgggcgcgatgaagtatttaaaagcgcatatccagcaacgggcgtttactagtgacccccgcaatcgtgttatgatctgaaaggtcccggttgggtagcgttgctggcccacacgtttagaaactaaacaccgacttctagatttcttgcgcgccactgatgcgcctcgatcagggccgggtctactaaaacataccctgacgtcccactacccgcttgttcaccgtctcaattgcatatatcagggccggtcattggctgtctgatccgtcggaagctcaatgagaaataaaataatgagaaaaaaaaaaagaaataaggaaaaaaagaaatcccaggatcttcaaatgaggtgggccgatgggaactatcacgagcagagtcggacttttaacccccacaaatcacgggtaaaacagaggatatgcgggaaaaggactcgggacagattgcaactggggccatcgtctggacagtcatgatcctagacaggggagatgactatcctggcctaggcattggattctagcccccattgtagcgaatgggggcggattgggggccatgacgttctcgatagtctagcgcgtgcctggatactccgagatcccaccttgccatggccatttcgaaaagaaaaggaattatgccaaatacgaaaagcgaaacgcaaaaagcgaaaacgcgaataacctgaagtcgccagttccaccccggcccgaggcttgtccccctatcagtcttggcccccacaaacgcaccgttgggaaaaataaaagaaaagactttacattgtttattaatgaggcctatctgggcgtatcacagggtggacggagactaatgcagtacggagtattctcttccaaaggggacaccctaaaaggtaccgtccccatctagcaagtcgttaaataccctaaacaaatccgatttcagccccagatagtcccattccagtaaagatcatatgtacagggcccgctctcggttccttgttagctccggaatacttccaaggtccgctgcactggtattataggtgttagatcgacacatatccggaacgttgggggtcctggctattataggcagccgtgtatcaaaatggaaaagccgtaagtaatggtggagcttgtcacagaaaacacggaggctactggtaatttgagggtcatgatatggtcttcgaggatggactctgattgagtccttccaaagctattcttacttcaaactggcatgcttgtcaaaaatccaatcgcccctaggatcaggcacggtcatgatcggctcactccacaggggatccgcacttgtatccgttggcttcaggacatgtgcgatttctactaatgcacggttgatcatttagtgcccgattacagagtatgaagtacaacatactaggaattaaggatgttctgaccgttttttaaaaagcgtcgggatctacaatgtatggcgatctttgggttcttaggcttgggatcaacactattaattgacttggccaggaacagcttatccagcccttcaatgcaaccttggaaccctggttctcattgatttggtttcttttgatgcatcctttgtgttttacattggatgggctcacctactttgaccaggttgtaatattcagtacggagtacgccttgctcagattcctgtagtatgtaggttataaatgccgcattgggctggtgctatcaaatggaacaatcggctattcctcccccattcaactggcataaatcgcaagtctgtcaaaggccaagagagaacagatttgaaatcaatcgctcgtagccattcattttgtgggttcaggatttgtctaaaaccaatatgcttcgctgtacatatcactctgcaggatgcaggtcaaaaaccaaggcatatcaggaaaaatacggaccgcaatcccattgatcccaccttgacacaccgctcacctgcatatcaacttcaaatgcacgaaagccgttagagctcatgggacctttccaggtaggagacaagttggagcttctggaaggtcacattgcctcctgggaaggatcaaagaaccaattctgcttgaatagcctagaaatcgaattcctcggtggaagattggtcttggctgagcatgtctcagacgatcggaaccagtatggtgaggataaaggctgtggatataatgcggtatctttatttcattatttcaataaacatacatagatggatgtccatcccagttgcttatcgtagcgataatgaaattcgcaacccgtggacctcgagatgggaaatccaaatcacgtgatgacctcacctcagatcttctctgggctcttggtccaacagcatcatcgtaaccaacgcgtttttatccccacgatctctagctatctgctagtgtctcacaacacatcaaactgagaccatagttagcttgcagcttcctgattcaccatgaagctcgtccggtatgtgattacctttattgtgcgcggcaagcagctcgacgcaccaagcaaccctcaaacccactcctgctgacatttaatgatccttctagctttttgatgaaatgtgccaatgagacggtgaccgttgagctaaagaatggtgagaaaccccggcgcaatccccgcaatccccaacctaaagtccccacgaatatgccaatatgcgaaatacgcgaacgaactgtgttgtctaacttaactcccgtatctaggcacaatccttcacggcaccattgtgtctgtctctcctcagatgaacaccactctccgggctgtcaagatgacccccaagggccgcgaccccgtttctctcgacaccatcaacatccgcggttccacaatccgctattacatcctccccgacagtcttcccctcgataccctcctcgttgacgacgcgcccaagccgaagaacaaggcgcgcaaggagacagaccgtggtcgcggtggtggccgtggtggaccacgaggccgtggaggacgcggaggtcccccccgcggtcgtggtcgcggacgtggattctagattttctgttttctatgagaaccatccggcgtttgtttctgtcttcgcaatcggtttgattttgcatcatatgggctacaatgtgttgttccttttttctactacccaggccaggggtcccgatatggatggtgggtgacatactgaaaaaattaagcaattttaccggggaatgttccccactctgaatttgcgcttctcaataccgtgtacctcaataccatgtgctcaggtgaacattagctatcaaaagtactgtggaatcacccgagagaaggatacatacgatctgtgactagatccaccttcccttcgtctcttatctctatgcacggttccgggccatgtggtgtgaaggcgctaagggaggctttggccaacatcaggccacagcaatatcgaaacagatatctaaaacgtcatgcgagtatgtgaacctaatatcgtaggcatgtccgactctcgaataggtctaggtttttctctaggtgtaattcttagtgtcttctagcgtgttccctttccgttaaactcaaagactcggacacgacggtcccataacgatatataacgcatccgagattggcaatgccgagaaggttatttaaagcaccgtggactattttattctttttctttttaaagttctcgcgttgagcacccacatttagtggtctcggaaaacccgctagagccaaaatcagcaagacggcgtcttcaatagcacattctgtcccaattacctagttactacctaattgtggcctctcggtgtaatactacctctactttgacgttttgatacgaggcttgctgaagaggcttgctgaagttacgggagttataccctataaagaacgaaggtttaaggcgtgaaaatatctcagtggaaccagaccaggggaataagctgcgagtgcgcggtttttttcaaaaaataacatgagacatgagtgtccgctcaatagccttcagccaatgctgcaaatttaatccgattaaggctggcaatatcttcccgtgcctcctgagctctccaaggtttggaacaaccgggtggctctgagaccgttgccaagatatagaatgcggtatttcaaaggataccggaacaagctcccgagccttttggatcaataaggtcaataaggatatcaccgtagtccctttcaagctagaggggccagactctgttgatccaacaggattgattgccacggtcgacttctcaccagctccgccaagcgtcttatacgcggtatgtggctgataaggaccttctatttcaggggttgggttcccgtgtgcggaccatcccgtgtacatcgctcaatgatcaatcaaagccatttcggttttgatttccgaaagccgacgtgaaaaggttcgggatttggaatctggtgaaaactggatcgacgaactataaagtgctgctaacgtatgttccagtgtgttctttcgtcttttctttgtatactccgtacgtatatacgactacgtagcattgcttggaattcggatattactttcctattttgtgattggaggagatcatttccaagcgcgtcagacgacgtgatatcccaaagatcatctatgcccaagccttcatttcccagttattccatacaaattcgggaaatgtttccaagacacatctttgatcttcgctagtatacatgtaacaccgttctgacccccttagcacgacagcgccgatctcaatgagtagccaaatcacccctgtacggagtacgttagagtgggtatcatagtgggcgtccttacggagtgctgttcgacgtccggctcggtcccggtttgttttacaaatgtgggggccggaaaaggggcattcagatcgtcgatctactctcgatctgtcatcgatctgaccacgcgctgttagaaaactcccatacgtgaagcggaaattcgcgtttcacaataagtgatggtgcaatgttgaggcctgagcaggcatggtgctatgggctatgggatcagacgatcgagcgatgtgacagccgcccacgtgggcacgtggagactcgttgaggctgtggagactaaatcactcattgattgtcagagttcgcgagtcgttccaaggtttattctcgaagcaaggcagtgggggctcaattggacaggcaaccaattacattgtcgatgttgcataagctaaattgcaactaatgggacgatagccatagccctaagtacaacctaaacgagtaggaccggatcagaaaaaagggtcgacggcccacatctatgatttgttcttcgtatctacagagtatgttgctggagatttggagaatctgttcagaataagcgaagatcagatgattgtatctaaagcatcggtctttgtcttgtagaaccgacacagtggagttatatataagctaacaaagtatataccacgacacctcatgtctccttatttgacatcaacggatatattatgttgagaaaaatagtataataaagttatctgcataagccttcctatgaaagccgatatatgcaatagcatgcacaacggcagaccagatctagtactctagccaacgtaccatttctttcattaatggttatgtacttggattcttgattctcggcccggtcatcattaagtacatacattctaaaacgacactccaaatgtccaaatgtctaaacgttaaaatggtacaatagaatcatgcaatgtatcatccgctaatcttgcactttgcccttccagctcagctaattctttcaatcgtggatgtaccacttgaacgccgtctttctcaaagaccggattggagtctaattcatggatcgcatacggcggagtaagcttcttggtttcagcaagttcggatcgttcctcttcgccatctttccatgggcgttttcatccacggatccaaaaaaccaatccccagaatagccaagataacacctaatgcaacaccaacgcccgtgcctgtttagcacctgttgaaagctccggaggtttctcttctgactcttgagtcactgccatcatcgttgtggttgttataactgctgaagtcgtggttgaaacaaaggacgtaattggggccgaagtaaggtcagtagacctccaacggagctcaacaccatatccgtaccaactatcgactcccgatgtgataggaatggtgagtagtgtagtaccggttacgtttatatgtttaaacgtctcgttcatattgaccgtggcaccgaattcgcgaacctcgaaagtggcgaattggtccatacaacaggcgcgtgtagtgaatgtccagctacttggtctatagtagcgttatattagtatgtgtgtatttcattttcccaccgtcctcatctctagtaatgccaattgcttactgataaacagggcagcatgttcctatagtttcggtggcgctggtataatttacggccattgcccagccgctaggacaagcgatcctaggtgaatagtatgacgatggggaccagtttgatgggagacatttggcatctgcaggacctaagtttgcccacaatgatcttgtacctatgggtgaggcgtttaataaccagaaatccgtgagacattcaatagccagagtaaaggtcgtcgtcagtggaagatgcgaccgcgtcgtggttatcattgtgggaggagcagtcaaacaccaaagcttcggacgaggaagaagttggaagaggaataggataggcaaatcggggttgatgaaatgacaggttgtaaaagcaactagactactgtgtctacccgtgtccaagatgatatgcggtccatccgatacttacaagggggaaaatatatgacccggtgtagaggtatggggaatgaattaagtaaggtataagcaatgaaatggtcataaggaaaagccagagggtcatatttattattcctgctgggaagtcgttgaaacctgtcttcagaaaacaatgtagccagctagaacgagagccttgtggacgaaacgcgtttattgagagcaagccaacacccgaaaacatctagataggtagcatagtcaaagtaatatctaactagctttcgccatccagtctatgcgtagttgacagggcgtcaacgtatgcagtcaaaaccgactcactagaggtaccataaacatgccgaaaaattgctggaagatagagtctattggaacgatgttgtattagtcggtataatagtcattatactgagcatatcaaggcagacaactcaccaatacatcatccagagggaatgagttaagctggattgtctttaaaactcgaattacaatcctccgtcattgtaagataagtagccctggaggcctgtaacaagctgatcaaggtatttttctaagtgattcgtttcatctaattgtctctgctcgttcggcggtagaaataccattcaagaggtgatccccgacggttgcacgcagaaccaagtcagggatcttgtgagatttgagacaatcgaataatacaagggcgatgtttgctgtcattatatctttggcggtgaccttcctaccaatttacccagtagggcggtcatccacggtgtatgggaccttccttattgggacatctgtcgttcgttttttctttcattcctcctttttccttccctttctctcttcctcctctttttttttcgcttcgtcccttcaacctgttgtgggcttccattttcatcaaccttgcggaaatccattctctcatcatgtcaagcttcgataagttcctcaatcccgcattctgtgcgaataacacaagctcgccatgtcccaacaagacctcccaggctaatagtgcttgcggccgctgctacttggttgtggtaagtctccaacactttgatcttttcaaagctctgcaccatattctaatcaaaatcaaaacagtattgcggcaaagaatgccagaaagaacattggcccatacacaaagagaattgtaaggacgctctggggtatgagacatggaagccagactggcacagaggagatcgaaagccagagtttttgaagaatcgagacccatctgaacggaatttgaatgacggcaaaatatcgtggtggggaggcatgccagcattggacttgttgaaactggatagaaatgaaggccaggatgcaccccccaagatgagtgttcttctcacaggtaagagactgtctgaattccaacaactgctcttttgactaacacaattcctgatagcatcacacgatattcggaacgtagtcgagacaatcgctcgtctgccagatacctattcggggcaatgtgagatcgtgatgaatggcatccacgctgggattttctcgcagaatgttcttcttgttctgacagctttccattttccaccagagcacgctgccattatcatgattcacttatggtattcagctttgatacccgcgtctattatcaccgcagtccgaaaaaagctcctgccaaagattgagaaagtctgctctgaagctgcacaaaaacggtctcaaccgtttttcaagtgcgtctggaggaagaacaaagcatccttgcatgtggaacttgcgagagatgagtgggaaggtcttaaaggataccttcaggttcctgctgacttttctgctaccgaagccgcctgcaatcgacgagacgtcatgtttgctgacaatagaaaggatgaattccaaaggactctatacgcacagcctagatactggcgtgtctccactatgaagttccgcgatgatggaatcatgctgcctttcgggtgctcacgcaaggcatttgacactcctaacccgttagtctgcccgacctttcattgtacctgtcatgtcactaatacaattaggatgtttttccataccagtcgtaattgacctatgccagactctgcagatccgcgcaccagctgggacctcctggatgtatgcactggagcgtacactgcgaattatcctgcgaagaatgatctgtacggtatgctattcatctacctccgtaagactctcttgggtttctgtcgccaaatttcgaaacgagatgtaaaccttcgacttctttctatcgattcactaagtctaccgacatatttcaaccagctaggcgaacatccaagatttgacagaattgatgtaactcctcccctaccacccccacctccacctccgttttgaattctattatattcttgagacaatgctaatttgatatagacgtatgtggctgcagaaaccggcgtgcttgggatccacaccgtcctcagggtatttaccccaatgctgaagccgaagattcaaaatccaaaggccatgcttcttaccctctttatccgcgacattgaggatatgtggaccaaggactccctcgacaaggacgtcgctcgtgctgtgaaacacctccctcaacctgagtcagcggctagcaatgatgcagaccaggtgagaattaacagatcaagctctttcttctgcaacgtcagtaaaatgttcgatctttacaaaaaaacctttgaatttgacaaactcaccccaacatttggattgaagatgaggggcagcaccacaatcgtggcccactggccaatgcgacctggaaaacacgccgccacgacggtgtttgagattcttgagggatccggcgccactggctgtgaacgctacgtcgaatgggaatgggaatgattatttgcacaattgcaaaccaccaagcagtcaactgctgggtgtgtgtatgtatctccttattcttactgctcatgaatccacaaatggtatcatcgttattcaattatccattaatcatgagctatctcctctccatatcctcacaatgaccaatttctcccacccagcctgcatcccactcgaccccgccgtctcagcgtgccaactgccccagcaacggacgcgttccataacctcatcaggccgattctgcttacagagtaagacataagccacacctcgcacagacagcacaccagggatagcatcaagcagtctgtccgtagtttccataccatccgctccgcccgcatacgttaacgacaaaaaatacgagtcattatcgaacttggcagagcgagacatggcctctgaaacagcagggtcattctctgccgcagaaggcagacgcggtagatcctcagtcggaacatagggtggattgaagaggaggacatcaacgctgccagcgcgaagaggtgcacaaagatcggcagccaatgaagcgatgtaaactgattgagacggctgttgctctgcctgaatagctgtcgttgcggtcttctgcgttgcgatgcaagcattgcgattcacatcagtgcctagtgtgagaatatcgcgccggccgaagatctcttgagactgtgcggccgcgaatgccagcacaacgccagagcctgtgcctacttcgacaactagtggtgatgcctctttctttgggaatcttccagagagccattttgattcggatgcggatgacaatgtgtctaggaagaggtatgagtcctcggatggctcgtagatggtgtcaaaggacacatgtgaagtatctggtgtgggaagcatggtgcgtatgtttaataaagcccagtccaggtttatcgactcctctttggagatagtggggctatctcgaaattatatgcagaactcgcgatcttggcctgaggcaatcacaaatttcaggcaaagaatccacttaagtggaagatccaatgtgaagcaatacaataaaaagtatcagcaaatggcagagaaggaaatccaagactaaatcccgagacatcccgacgcgttgattcgttgattcgcctcgccgcctttgcctccaaaatccccggaaattatgtcattccttcaatcctcgatctaaaccctccaatctcctaaatcacctaccaaatattcaagatgcgcattgctcagcgtttattcatggccatgccggcctcgatcggctcgaagtccagcctcagcgaggcccttgccctcctcccgccgctacagctttaccggcgcattctccgcgtccatcgcaaactcgatcccgagatgcgcgtcttgggcgattcttatgtgaagaatgagttccgtgcgcatcggagtgtggagaacccattgcacattgtatgtttattcttgcccgagtttggcgtggttataccgaattgaagggaaggggaggcatagcggaagaggaagggcttgttgaggcagtcactgacattggcaatgatagatcgggttcttgaccgagtggcagctatatgcgcaaaagttggaaggtgattcatgggcaggagataagctggacaaggctaagttggataagatgagtggtatgttcttgactgttgttgaactctgtctaggtcggtcatgctaaacgttggttctcattgtagatcagcaacttggacagttactcgagcttatgcaggctctgaggaacgagggagagggagagggagagggtcaatgagttctctattgatcacatagcacccgaggctgacactaccaccccgagagttggtggctgaacttcaaaaattggctctgagctgcttcatagatctaaacagatcgagtgcagagtgcttgatctcggagcagccaggcgtgcatgatatggttatgctgggagatgcaggcatcttccatcccaccatcagcccatatgtatatactacgtgtaggaatagaagatacgaggtttgacttgatttgaagttttgacaattcaggtctgcacccggtcatatatacattatgtgctattgtttctatatgactatgtcgaggaatcctccaaggttatatagatgcggaacaaccccgagcacacgggatattgacaaggcgaccactatgcacaaaaattaattttagctttaaattcacctatcatctcttatcacttagcagggaaactgtcaatgaaaatcaatctagatactccaacatcagtggagaacgcgccctgttaatgacaagctgactcatgcaaagtcggctgccgatgccgatatcgagatggagaagagggtatatcaatcggaaaacccccttaaccacttgaaaattgcccaattgatcctctgtcacacctcgcccttatctccaagcccgtcccaacacacagatcccaaaaagccccccattcacccaaaatgccctccattctggaagacccctcgacccgcaaccccccaccaaaagcacacctagatgcagcgccgaccctaacagcgtggaaaactaccctccccaagtcctccgcgccgatgacggtctaccccatcacagggggaccgcaaaccgttccaaaggacctgatcaaattcctgcacgaggagttcactgcggaaatcctccgcggcgggacgtacccgatggagcaaccgatggcgctggatgagttcgccaactattggttcggaacgtttgtggccttggcgatcttggacgatgaaggggagggcttaagggaggggagggactgggagagtgtttgtatgggaactttctatatcaaacccaactatcctggtatgtgtcatgttcggattcgaaccaacctcatagtaataaaagcactaactctaataggtcgctgctcccacatctgcaatggaggctttctcaccgctactgctgctcgccgaagaggcgtcggacaggctatgggcgaggcatacctggaatttgctccaagactggtacgacgtgcccccccggctttgcatttgatcacacgcatgacatgcatgactaactcttttggtaggggtacacatactcagtcttcaacctggtcttcgcaaataaccccggctctattcgtatctgggagaagctagggttcagcgttatcggacgggttcccaaggctgcgcggttggcgaacagcgaagaattggtggatgcattgattttcgggcgtgagctgggaaattaaaatggcaggtttcagttttagtttgaagcgtccgttaatgtttgcataaagaatcgccgtttcaagtatataggatcgtgttgttacgaatgatgaaaatactgcgatgaattatacatgacaataaacttgcctagaaagcaagtaatgtgatttcccgagcgaaaagcaaaactagataaaactacaaggaataatattcacagggaagagaagctaagtggtaatcaatgagactcaaaagataaaaccgcgaaatagatgacctcaacgctcagaccataccatgcaaacaatagggatatcacgcaaaacctgacttgtcaagatgatagctccgcttcacactgactgaacaccgatttgggaatagagatcgaaccgagaaggggtgtaatgcacaagtaaaaaaaacatagatagaacgtagatagaacaaggtcgtagaagtgtagatagaagtcggagggcagagaaagaagaacagaagcgatgagggaggcaaccaagttgccactagcgccaccgtggacgtgtatccaccggtttgggggcctgctctttctccgccgttcgcttgggaagcgggagtagactggttcgcctgttcctagaatggcccagcgatgtacctggtcgtgaggatttgcttgggctctccatcccacctggagctcccgacacacttcgactgaaagctgtgggagggcccgcgaagctctggcgactgcgaggtgtgtttgacatccctgattgtcgatagagccgagcgtacggctgtagatcgaaactcgaggactgctccggtgtgggagagcacccgctccttggactccgagaaccaaagcggctcgagacgcgactgactgatcgaagattgccggaaatgggagatgcggaagtctctcggaaagagctggagaatggaattgatgatgatggccgaggtgtgcgggcgagcggggcggatgacttccgcaatgtcgaattgtaaccagtattgctgtcgtccacctttgtactggcgttccagcgtgggcgattgggaattgtagatggcggcgctggtgtacgagaacgagcagccggggtcggtgtgaagtaacttgaggatctataggatgaagttggagacgtaaggcccgtcggttgggggattccggactgtcgaccggtgtaagtcgtggcttgcggcaagctggagtaacgacggtttgggggcatagtcgaacgggctgtggtacttccgaccgaacttccgcgacggcttgagccacccatgggcgttgaggcgcacttgtacccgttgctggtcatgacgactgacgacgccggcgagcttcctggggtgtcaatggcactgcctgcggctggactgtccatagtgaagatgctggagatcgagtctcgtagctggtggcccctggtaatgtgtacatcttcgagagatgtatccattaccttagcgctagccttgagagcatccgttcgggatgtcatgtcggatagtaggcgcaggatctcaccattgacagtcaatcggtcgttgacgcccttttgaatgatggaaaccacacgctcaatagcaggaacataatgcattttcttcgcctcatagttttcaatgagcttgctcaacgttgacgggttgtgcacctgcatgccggtttccagcccttcttgtagcttgccaatactgcgttcaaccgattgaaacatcttttgtgcctgggccccagcattgcggaaaaccagaatccacttgtcttcagccaactccttcaggagagcttcagcatcggtctcaagaactttatagctcttctccaagcgatttcgccggtcctcaatctcttcacacgcactcgggaaaattgtctcagcgcgtccctggaacatcgatagtcgcatgggcaagaactccaacgatgccttcaatggttgcatgcgtgcaaaaatagccatgaggttagagtggctcgtgtcgtcctgcggtgttttaataacgggagtgtcagacgtcgaggtcaagagaggtccaatactcagacgattctgcgaatgtctgcggcccttcatcggggactcttccacaatagtctccagctcattgatatcaaggccaccactggtatcggtcgtatccatcaatgcctgatgtcgcttctcttccatctcaaatatcagggcactcaagttgtcaacttccacgcccacatcgcccagaacgttcgaccaaagctcttcccactccattgccagttcaacctgttcttttacgcctttcagctttttcttaatctgagtccagttttgcagaatgctctccatctggctcacgatagtgttcaagttatccacatccacattggcaatgtcatctcgaagttggacattctcaatagccctaacatacacatcgacgagggactcgaagcgcgtgattgctttatcgacttcatctagcccctcccggccaccagccgcagcccattccacgtcatcttcagaatccaagccgctcaggacatctgaggccttcttgatccaaatctgaatttgctctgcagcgccgttcaaggcccggactgcagacaaagccgtggaaatgttttcgatgcttgcctcgagcgaagctggctgtgggagggggatggaggttagctgcgagagctggttgctgaaagaggcacgggagaaagaatatattgagtcggcgcgctgcaaacccattgggttaaaatatgattgcgagttggacgaagagcgcgagtgggtggcgccgatgggaggcgagtctttgggagggggtttcggagcggactgctcttcagcggaccgttcctctcttcgtgcggtatcatcaacatatttttcgaaatcggtccggtcatcttgaacgtcattgggacgtcgcgagttcggcattggggctgcgcgcggctgcgcgagaaccggctctgcgacagacatgggcgtgggtgggctgatgtgttccccgggctgagcagtcgccgaaactatggccggagtgggcagtttaggaccgtccacaactgcttcggatgactccgggttatctcttcgcgcgtctgcaatctcttgtaggatatcttggtggggaagctggaggtggttcgatgcgctccggttgaactcctcgttttctccaggtgatgtgttggcacgattccacgcctggcccttcctccttaccttgatcgacaggtcttggtggagattgtcaagctccttcaggtgctcttcgggtattcgaccgactgcattggcattccggttctgcgccgcggacttattactgctgtccagcagcttgacccgagccgcgagggcgggagaaagtcggcggaggatggatggtcggccggcgctagtcggctcagcagggacaggttcttcttcgttgttgctgcttcctaagctccacagggatgatttggacttcaggcgtcggagggtggaggtaccggagtcatttggagagacggagagcgcgggggtgagcgatgggggcgacgtaggtattgtagaggtgttggaaggatttgtcgcgaggtcggtcgcgaaaggtggactgtcggctgtggcatgcatggagacaggccctgggggaattgaaagagcaaaaagaccaaaggatgtggttcagacagggatacaaggaatgtttggtcttgctcggtgctcggtaacagggagtccctttttaacgggttaaggctggctttttggctgttcaaagagtcggagagaaatgctgctacatggcaacaattaatagaggttctaaatgtaaagtctcatgaagagtgagatactatcgggcagcaaccattgaaacgaatgaaaagagggataaggtggccagtatgcgctgtagaatggggtacctccagccccgtactactgactatggggcttgatgtacctcctcggtatgtaattcaaggggatcaacgaaatgagatcatttcacttttgttttattttcttcttgtgttctttgttttctttctttcaacggtttcagttgagtggtattcactatttctattaacacaccgggctgtatatatatcaatctcacctccttgccctatatacatatagtacaacctctctgtgcacgaggtttgtcgatcaaaaatgcattaaagaaagtttatatctgagtcattttcacaacttaacccttttccagccttttccaaccgtttatgccttctgcccaagaagagttaggcagggagagaagatatctataaaaagacattgataaaggcatctcaaaagactaccatcgagccaccttgacagagaccacaacgcggccgactaatcttgtaagaaattaatgccaaaggaagctagtcccttctttgtacattccgatcagcaatgagatatcccaatgcggactaagcactataacaagacagggataaatgttcaaagcttcaatctgatgatgcatgtacgcgtcaatggaatgcaacgtgagatactatacaattaatatacaataaatagaattagaaaggagaccaacgatcaagaaaaatcaaaatagcagaggcggaagagtcggcgacaattcaggggtatcgtatcaagtgcacataaagatatcaaagagaaaaggaaacaatcgagatgcaaacacgaatttccaacacttccaacgagccctcaaatcaacccagcactcgggggtcgaccagggttagcctcctgccaatcgcgcactagctcttcgcggacggttttacaccaagccaacagtgcagtatcgaactgctcccaagccgtagtgccactattctgtacaacacccataacatcaacatccagccggagctcccaccggagttctgcagcttttacccagaactggagattctcagtctgccggtacggcttttcaatgtctaggtggtaggccgtaatgtcgccaaatttgcgtttcgacttcttgatcgcaaggttgtgtaactgaaccagggcacggccgtcccggaacctatcaagaaacgcagtgggaagggagtcggcgggagtctcctcaaccggtgtccaggtcggtaaggagtcaccgccaggcaagaggctgcgcaggaaggactcctcgcgtgagcgctcccggcccgtccaatcgccagcagcccaatcccaattctgccgctcttgagcttcaaggtcttccagcttcttttcctggattagcatgacgcgcacagccgcgatccacccctgaatcttctcacgttcctcctcgcgcagaccgctggcaaaatgccgggcagaaaaccgcttcaaaacttccaggacgtccaaaagttccttgcggatgtcccgttcgctctttattgatgccaagcgctctgggtactcgtgggtggtatagtagattttggctgcgcggatggcatttgtaacatcgtcgaggatgcacataccctgcaactcctctttattcatcgggggcgcggcctgcccggattgatcgtcctcgtttgggacatcgtccggagaaagactcgatctgaggattgggcggggaggaggctccatgccattttggattgcctcgatattagactctgccttatccagcgcgagcgtaagctgccggcgcaagaaaagcagacctggaggaggagggatgtggtgcgttttgatgctgtacgtgctgactgtaggcggcagcatcacctcggcgtcctcgtcctcaaattcaaattccccctccgtcaggtctgccatacctgacgggctcgcgaccagatcatcatccatgtgtcgttgattcggggtgatcaggactcgtggcacattatttctgttcttcttgttcttttcccactcgcgactccttccgctcttcccgtccagtaagcccgtcctggcaaaatagtattgtaagtgggcgatactgccgaggctcatgacgctgtcgcggtggcgtgccgattccgagaacttggcacccaatgcacgggtatatccatggcgccgggatgatgttgatacagacgatctggcatctgcggaggtagcggaggaggtcgagcgggaggactcggaggaaaacgtgcggtctggggaggaatatgaggagatagctggcgttgccggaatagatggtgacggcgaggagtcgcgtatagacgctgccggtttagagtccatggaccgtcggggcgcatccatcttgattgaatttgaattgtcaccgggtcagaaggaatggatctgtcgcgtggagaccaatcactagaacgttcacagtgacggggtattctgcgggggtgacgatgtgacgttaacaatgagggctggacgatccctagacgagcaacggcttttatataaatctattaatgaaaggaccaaggtttaatgagacctgtaggatcgacggacgaaaaactgcttttgggccaaaagggggggcttcgactaaccggggctaaaaggggaagcgggtcaactgccatggagttgaaagagatgagtgttcctattttccaccgaaatgaaccaatgaggcccgtgacacccctttttgattatcgatcggaagttatgaagctatacggagcacggagtatagtaacatgatgctgtatacttccagggcctcgaacatccacgtgttcctgaattgcctggtaaggtttagcttgtgccccgcatcccatggttcgatgactggaaccttccaaggttcgaacattaaaacttccacgtggcgttacatgtctacattgtatactccgtacaacttcaagcccaatggaaaagagatgtatatgccattctatgataaataaccctttctaatcctctatatttgaaacgcctgtcaaaatgtgcgtttggaatgccttaatgcttcacagctctcggttcaacaaagatctccttgcggtcccaagcagctggcttgaggtcatgaatgtccttcgcacctctcggttcaggaccaaagatctccttgcgatcccaaccagctggcctgaggttatcaatgtccttcgtcgggtggattttgttcggatcggtgtactcaatctggtagggattgggatcgtaagtctgattgaggttggcgagggtgtgattaacctcgcggtgcttggcttcgtcggcgcggacaaacaacagcaggtccttcattttgcggtgaccctctggcatctgccagtatttaaccgagagatcgggtgcctcgagtttctcccacccgggaagcttgccgctctctagttcctcaagagcacgagtataagtaatgacagcctcctcctcaaggtatcccacaaatctgtggcaaatacggggggagatcacgtatgccaggaagaatccgttgaagaagacaccctgggctgcgataaccataaagcgcatgaaccagcctggtttgtccagttttaggaaggtaaggaggtgcatgcgttcattgtatgcttcttcaagtagggtttcaatcctagaacgaaggaagtgggttagtattgaggtgatatcgttttgaatcttgacttgggtagacataccatccattgtccctcttcatcttgcgaagactactgagatgacgcagcatgccgcccaccatgccggggacaccggccacactttccaagaaaataaaccgagttaaccatttttgctcggtcattctgaagaatttcggcaggttctcgccgggcttaggatgtctgtatcctgtcgctgtgtccataccccatcggaagacacgaactgttccaagggcaacccagtcggaccagtttgaagcttgtctgtgggctatgcgaatattttccatttgttcctcggagtatctggcatagagttagtgtctggctcagagagaggggctgccgatatacttacactggatgcacccaggctgtttgcacctgcttgacattaggagtcttgggtggtgggaagaagtccttgttgtttttctgaggtgttgacgagataggacgcttgggtgtgaggctgaacaccgctgtacgcttgttgattccacgtgcgggcttcaatgtctttgctgcaactcccgagtaggttcgtacaacaaggtggtactgcggcttcgccgcagccctcatgggagccctaactgagagagtattcatgatgtggccaacgagagcgagtttgaagtcaagtcaagattgagggtgataaatgtattgtaaatggtgaagatgattgagacgaagaaaagtgaaagaatataaggaagtttagggaatatacagatgtttaagataaagtctcggttgcacagatcaagtggacaccccctaatcttttaaggctttaaatatataacctaccaatcatcggaaggcgaatataaccagggatttgcaaaaaaagttaaagaaagcccctggaactgcttaggttatacccttgggatgatggcattccgtatagttcattgccgcaacacccagatattcccccattctgccattatcagatcacttattcctctagatcatatccctgttgatatacttcaaacaacaactgaatacatcagccttcccattatctctacgccatattccacgttatgaccaagactactcaaaacggtcatatccttgttctcgggagggaccggcccgggtgaacaccgatatatgactcagcccgccaggcgaaggcgatcccgagaaatagccggcgacaaagcccggagttattttgaggtcgttttctggttccgggatcctgaaaatatccattccctctatcttaccggcgactgcatgatcgattggctggtagccttgagaaaaggcgaatatccctgcccgtttcctgccgatcaaagcactggcacggagtctcggcatgaaagatctataataatagatcgatgcatatataaagagcctgtcaaatgtcttcatctgcaagtcaaggtccgcttaccttttgtcaaggctgtcattctccttccttatatccatcctctgccgatactccgtaccgagtactctccttcaatatggatatctctgcggagtaccaatgcatagattatgcgtaccggctttacctagtattataacaagctaggtgatatcatcgttcaaagtacatagttagatgagcattacaaataggttaatagctaatggttatgttttcccttttctattattatccaatctgctccctgaatcgctagtcgcctgtctccatattttcaaccttctacatttctttctcacattctgtgactttgcattcttagccttatcccaatgttttgcctgttgtctgccctgtcagtcactgctacactagctaagccattgggttccagctgttatggctagaagtttgtattctagaaacaatagtgccgcgcggtcaaagagaccccgaacactccggctagtattgacttattaatagcaagaatgtagatttcatcatgattaggtagcatcgtagctgtacggtcaataccaaggatgggtttcgaataatgatggagtagaagaatccacctggctctggcctccacttgtgttctgattattgtatcagagcgaaaagaacccaactcctagtcccttgcttcaaacatggaatctgctgtccgcatcacaacaaacccctcctcgtcatcacgcacatctagctcccgcttctccagcttcacaacaagagccctagagggacccttttggatgcgctggaggaatctctgcaccttttcgtcactgctctgggcctcgccctcgacctgataagatctggtaagccgtctatccggagacacgataagcagtacccacccttccgcaagtggtatttctgacccagccgttgagctcatcgagattagcacacttttgggtgaagtctctatagtacgcgataggtagccactggttaatcgagggactatgatgtcgtctgttaagatggacagtatttcctaccggaagccgacacctagggatccatgttagcgtcagaggatacggtggtgtttaaaggtcgacccaccttgaacggtgccgtggactttgaaagcaatctgaaatggatagcatatcagcaggggaaacctatagcttttgctttacttctagaaatatggctgaatgaatatgtagtagaggacatactcgagtttgtggcatgtgtgacattttgggatgaaatatggtatttggaagagttgggtagaagttgaagtgtatgaggtagaggttgatgtcaagcccgagtcttggcccccgcaaacttatcttaaccttaagggccaagccacgtcgatatcatttgtgcaagacgtcgcaatgctttgcattgaaactagatctgtgatatcaactgggagatgaatacttggaggttgtactcgatgtgatattggctggtgctgattggttccgcaaaaggatctacaacattacaatagacagtacactgaacatttcctcagttatttcgatatgcaagggaaatctattttattttgattttagactgggattttactccgtgtcgagataggatatagatgaggccacctacgtggcggtgcttcgggcccctgagtaaacactggaatctcaatgttccgagttcaacttctccaaacctgcgccggccatgccactgatataaaatgccctccattttcgcctggcttcggcgggtctattcgctagatacccttgacactcgtttcacctcctccgcaatccctgccaacaccaacacacgaccttccaccaaggatacccgcaatgcaatagcccagggcgcgtcaccttcactttggcgcacaccagaattctttgtctactacttgttctttatcactcttgttccattgatgttcaagaccgtcatcgatgtctcgaaaggtgagtgtaggccggagaaaatgctgggcctacaaattctgacagcggatcaacgtcacagaaagccacccagcctactccacatactctcaccttttatcacccggttggatccctggccgtcaggtggtaagtatgcaacactcggcgttcagctattcatatctatgaggccagtcccgactgacattattgctctggccttaggacaactccgatgtgcaatatgaaagctttcgcgacaacattcctgtacttctactactcctaatcgctcatcctttggctcgccgcgtttatcagttacacatcaaccgctcgaatgttggaacaaaacaatcgagctattccgtggtcagtgcgggcgaggcgcaacttgaacagcgaatgcgcttcgacttttggttcggactgttcttcatagtagggcttcatggagtatctgctttcaaagtattgttgattctgtatatgaacttccgaattggcaaggatgttccgcgtgcctacgtgcctaccgtcacatgggtcttcaacctcggcatcttgtttgccaacgaactaagcggtggctactcccttgagcggatagcaaaggtgttctctctggggtctgggacgtcagaagatggagccaccgcgctagtccaatgggctcaaactctcgatcatctagggggcttgatgccgcgatgggaggtacttttcaaggtcacagtgttgcgcctcatcagtttcaacatggataattactggagtgtagactaccctgcaggaagtctaattgaagtaggtcttccgaagccatcaaccccatgtgacaatcaaactgaccgaattcaacaagaagaagcaactagaccctgcgaccctctctgaccgtgaccgggttaagatccctgcagaaccagctgcttttacattccgcaactacattgcctatgtgctctactcacctttgtatctggcgggtccgatcttgacattcaatgactacgtatctcaacaacgatatacatcggcgtcgctcacacgaactcgcatcgtgatgtacgccgtccgctttggcctcaccgtgctctgcatggagctcatcctccactatatctatgcagtagcaatctccaaagctaacccagactggtctgtcttcaccccggggcaactgagtatgcttgccttcttcaacctgcacataatctggctgaaactcctcatcccatggcgattcttccgtctttgggctcttgtagacgggattgacccaccagaaaacatggttcgctgcatgtccaacaactactccgccttggccttttggcgtggctggcaccgctcctacaaccgctggatcgtccgctacatctacatcccactgggcggcggcggtgatggccggcggtcacccggggcgcccaaaccggcttcatctcgacagtccaacttcatgggcaagttcctacaaattcgcaacttcctgctggtctttaccttcgtcgccttatggcacgatatcaacctccgcttgctcatgtggggctggctcgttactctcttcgttctaccagaagttttaggcggcatgtttttcccggcctaccgctggcgctctcatcccactgcgtaccgtgtcatctgtggcattggctccgttgggaacgtccttatgatgatgatagcaaacctggtcggctttgcattgggtctggatggactaaaggatctgcttgccagcctaacaggctcatactctggcttggcgtatatgatttcctgctgcgtcgtacttttcgtcggcgtgcaggttatgtttgaggttcgcgaaggcgagcttcgcgcgggcatcaacctgaaatgctgagcttttaaacagcgtttttaaacatattttagaaattgtttgtggctagaacctggctataatgagatgaatatatatcaagtcttgacttgtatgtcacattaagattcatattgactattgtacagtttttggtatcaattcataaagtcatcagtaggacagggctaggccaagctccttcccaatactagtagggtttcgtatagtaagtacaagtacaccccctaaaagaaagctccacacctcgaatcctcatggaccttgtagcaatccagactacaagttctcaaatgacaacttttgcaccggatcttcccccaatacccacacatacaacaaaaatgccgcccgggccgccccgacgctggcggcttcgctcgcgacgcactataagaaagcggcggctccgccagtagccgttgcatcagccgatcaggaggcacagggggtgcatacgagcgcagcaggggatcattatcgtattgcgacttgattagtttcggtttccgcggcggtttatcgtcggcatccggctcagcgtcggcggtctcctgcatgggcgccgacacaccggctgttgtgtccgccatggccgccgccggacgcttggcacccgcagtgctagccggcgtcgcgctgcggcgcaaagtagcagcagctttgcctcccttggcggcgatgctgttccgtgcctgcgcgacaacgcttgcgcctcctgcgccctgcatgcctcctatccccccgctgcctgaggctattgctgcttcttcgtcgtcgaggtggttccggaaggtcttttgggactgcaggatgcgtcgcacgttcgaggtggtctttgctcgcgtgccgcgggcgccagcttctcgggcttgtttcactggtgctgggatggcgacgtcgcgctggttctcgcggtctagttcggcgatgtgacgtgcgatcgcgtttgcttgtcgagaggagatgtcgccgcccttgccggcgtcgcggatgccgcgtttgcggcctagggttggggccatcgcttgtgtcgggtcgaagcccctggttggggcgtaagaccagcctggtgtggccgttgatgtgtctgagacgagttcgacgcggaacattttgggatttggtgtgttgggaggtttggtgatgatgcggaagtggatgatggccgggggaatttgttggagatgaataaatgtttgtcttgtttgcaggggagtttggtatgtactccgcacaggacgaaagatttagttgatcgattgttgggaaaggaaatgctaatattttagaacctgggactaatttcatgcaaaaagaacaaagaaataaagaaaaagctatcccctggccatcgaaaagcgatagtggtcatgtccagggttgacaagcttcatacacagaaataaaacgcacccagcccatcccagtcataataaatacacagatgaaacatactggtcaagtttttatttctttttgtgcagcgtatcaaccctggactccagttctgtaatgtatgtctggagcttcatggtagccttttgaagtgcctataaagagaacaatcagttctgcaaagacaaacatcgaagagaaaatgggggccctctcaaagactcagcagggagctatagacgtaccgcaatatcttcagacaacgtctcattggcgagacggtactctgttaggatgtaatagtacaccaacgcgccggcggcgacagatccagtcaggaacccgaacacactagtggatattagcaaaaatatcttggacgctgtgaccaattgacgctgaatgtcattgaaaataggagaatttcccataccctcctcggaaagctccaacaggcttgcttgccggtagcgcggtggactcccagcgggcaccggacgacgagaaggaccggatgccgacgcgtccgcgcaaagggagaaagatctttgtgccaataggcatattggcaatattattttaaccgtagaggggagatttatggattgttcggtggaagatggtggcaagtggagtttgttagaagtgacgttgatgaattgcggaggtccgggcggctcggaacttgcctaagggggtttgtatacaaacagggagactacagtcacacaaaatatatgaaatcattcgaatgcgatatctcgtaggaaagctaaagtacataacgtattgcttcccttaattggccattgtgttctcgttgaagagatccgccaaaagatcatttcggcatactatcaaatctacgctgcccataccgtacgtactctcaaacacataaatactcaatcgagcgaaaaacggtcgcaggaccctctcgacaatatcgtccttggctgtctctcggatccagtctgagatgagccatggccgcttaagaccactgcgagcttggggctcgatgctctccgtggggagagtgggtgagcctgcaccgcgtggaccaaaagtctgagaaacttcatctgccagagcgatgggctcccagcggtcgggtggatagaccgcatcaatcgtgtcagttacgaaaagccattcaaggagctggaagtcgtctggggcgaggacaagcagtatgtcgagcagcttggacgcttgaagcagtgagtaagggttgtagacctccggctgagagccatggggtactgctgagatggcttcttgcagttcagtgttgatcaggggccagaatggcgccatgggggcggcagaggtcttgagcgcgactgctcgaagaaccataaatatttccgcccgagtggcggaagatggcgacgaggagctggttgccgcaagaagatcttccagcttctgaagcaacgccggcaattcaccgacaaagtaatcatcgctggcagaaagcaggagtagcgcgattcgccggaggttgagctgcgctttgcgatcggcttccaatcgggccgcagaggctcctacgccgaacatgatgcccgctgagcttggtggtggaaggcggacaagaagttcagatagccgttccttgtcagcgagaacccactggcgcagcaggtccatccagctgttcttcaccaaatccaattgcaatccaaagaatcggacatcattgaacgcgtcggatatgtccttcttccacattttcgccgctgctggtacttttgccatttgctgtagaagaatcatgacattacggttgagattgttagggaagagacgtgaccgaatgagagggcccactacattagtcgagacactagtaatggcggtattgacccgatctgaatcacccagggtcgtgataaacgacggcatagagaccgctagaatgctcagcatgtcatcgggtccagtatgagagaccgaggtacggtcataatccaccgaagatgttgccataggcccagtgtcttggttgaggcctagaggcttgctagtaaaaactgcggtaaggagtcgtaggagaacatcctgcgttataattgttagtgattatgataaaatcagtagtggatacacatactccaagttcttttcgcatacggcggtcttcgccaaaagtcgtattctccaatttcacccccaaaatagccgcgaattcaatcaaacgtggaagaatctgccggtgcgggaatggattgctaagaacatcgcgcaagaaagttgtgcagtccgtccaaatctcgtcaaggacatcatcgtccagtgagcgggcataagtaaccaaaaagctagcaagctcggactcagagagattggatgttaacgaagacttccggctaggatccaaggcattaggattagtgcgagtgtaaattgcattgaaaatggccgggatggtgatctttgggcttgatccgtcgagtgtatggaggagattgaagataagtgacgctgtctccgtgtcagacttggtccacatttccaccaatgtctcaagacattcaagtgcctccgcagtaaagaagtgctccaagattcgtcgtgagcggtttctcattcgcaacgaggtatattgaaatgaggccaaagattcaaaatctggtggagagccactgtgatcgcctgcgccccacgcccaaatagagaagcagaggcgaacggcgtcttggaaacagagaagaacagtcaggcggtcgttggcggtatttgggcgaccttgcccgctttccgagttgaataccccagacaccatatttccgaaaaagccctgcggttggtcagggctcttgactgttggaacgttggactcttcctcgatgagacgttcgtgtgcatttgcaatacaggtctcgaggccagtcagaagagcaattgtgacatgctcggaacggtcctgcggccaatcctctgtttgctggaaggacagctgaagtctgccatatgatgctcgaatttccctgcagaaacattccacgagcatcaataggatctggaatatagtacctgagtatagagggagcacctcgcagagcagcactatccacttgtctacaatttctcgggatttaggtgagctaattccctttaaaagacaatccagaagccgctctggcggctgcggtagctgaggtagcgatggtctcctgtctgccttgtcgctggtgaaagacaagatcgaaggacttgtcagacggtcacgagagctagctcgtaggtgttttggccgaggtggcgggggtggtagatatgcttgtgcgaatcgcaccttcagtgcagcaaggagtgtatcgattagtgcaccctgcaccacaatactggacccctcggaggagataagaaggcgctccaccaagaaatcgtcaatgccagactccactaattcctcggctcggggcccaagaagaagttgccgcatgagctggagtgcgtccttatgtagtcgttctccatctagattcaattccgtaggtgctggtgatagtgtgctgacgattcgaagagatgcttcaaatatggcggaatggaggcttttgaagtctgcattttctatccaagaaatcatattagcaacaattgtttcgtgagaagataattacgcaccttcagctttggacgcttcaaggcgcttctcattgcccagcacatgagtaagaagtgcgatccatccgttgtgcgaaagcgcagagatgatatttgaagctgtctgtaacaaataggcacattccttgtagtcatcaggggaaattgagtaggtgtctgtctttttctcgctagtttcatcagattcagaaagctcatcaagatttgagatgaccacatggaaaaccctagtaaactattagttatggatcacgcgttgggatgaaaagccgtcttacttgtggatagatggcaagtcctgcagccatagttgcacgctttgcgaactatcgctcgactcttgggagagaagatcaaggacaataaaaagtgggcgttcaagcatagaacattgataagagaacaaggtccctccaacatcaagcacttgctttggcggctgctcatgtgtgttgtgatgactgtgattccataagacatagaatcgctcagcttgttgctctgacgaaaggtggcgggatgctgcggttgacatattgagcattaaagctgtcagcgacgcctcgacaaggtggtcaatccaagaaattgaatgcaggagccataagcagcgaacggcttctacgtgaaactttggacttaggggagataagtaccaccaaagctggttgacaagaggggtaatcagatcgcaagcatcctcatagctgacatagaagccgggggtctgaatgaaaaacaaacttgtcactgtcgaagcgatggtcgatatgacagagaaggaggcggttgttggcttgtccttccctgaacctagtcgctgagagagcgcttcatacagtttgcgatctcgtagaacgcgggactttggaagcttcttgagcaaagtcacaagaatatcgagtggctcgtgaacagataggccgccatctcggcttcttagcgccgcgatagccagttcgtgagcctctcggataatcatttcgccaagattcttaggagcatatggaagaggtggaagctccaagctatttttactttgttcatagaaactgtggacagttttcaatatatcagtaccacggccctttgtgtcgttgacagcagtcttttcagagcccgcctttctcgagaacgcccgctctgtgagtaaaccagtcaacgatttgagaactttgttcaatgcagcggtcacggcctgtttggcagtgctttccttggatgagatctctctcatcttgacgagcactgacaatgccagcagaggtacatggatctgaaccatgtcctcctcgcggacattgaaattctcaataataaactgcgcgagatccaagtcacgcaacacttggtcgctatcaatgtctacatcagaacaccggtaatcaaccaagcccagaagctcggagaatatcacaccactttcaacgccatcaaaaaaggcgctcgcactgcggaaaacctcttcgaagtggttctcaggggctgtggattcaaatgcctgaacactgcgtacagtgggcaagaaaactgcagggacaatatatccaccaatttcccaacgatccattaacgacagagctatgcgaaagggcttggttctatcggatggaataatcggttcatgtttgatcatatccagtagaccagtgactaagggttgtaagcctacccggctgaagtattgtgattgtgtgagctccttgccatcaacggacgcagatcgagcggtttccattgataatttccgatcatccatcgaagaactatcgtttggggaatctggtcccaagaaccatgcccagagtcggcggttcaggctcatgtcccgccgagtgaccacacccaccgcagcaataaccaatgttcgaagatcagtagccgcaattttgctttgcaaaatcggagaactgagtggaaggtgggtgacaagaagatcaaggaagttacgctggacaaggagctggtcatcagatagacctgatgcaaaacatcgaatcaagaggccaggttccggtagaatgacagagtcggctgcggccagtatctcaggtgggatgttctgcggatcgttcccaccagccgtgcttggccgacggtctgcgatacctagctttgggaggtagcggttcaaataggcaagaacaccaaaccgtcgactagggttcgtgatagatgcgagaaagaggcattgccagaaatactgtccagatgccccggcctcagacgtcctttgtgtttcaagttgtccagcagcatctcgcagtttattcattgtgcgtagtgttggctcaaaatcttcacttgtctcctcttcaaggcctggaagtagggctagaatgattgctttcaaggcgggacggatggcccatggttctagatcaacgatatatccctctaccaaagacagaaacaatgggcggacagtaagagatgcgaaagtcaatgttggcgcaaggccggggagatacaaaggcaggtcgtgcgataagccctcgagctggttgtaaacagatgcatcagtaagcatactgtgagcctttcatgtggccacccatacctttatcaatccaaatatgtacgtgtagacttcgagggtcttttggtgcacgcctgacggcaacgatgggttcaagcactgggcgagtcgcttcgacaccaacactttatgaggaacgatgggctgatcaggcggatggctttggagtgcctaatagttcattatcagcgatgccaaacatcgctactaattcgaggaagctcacctttaacaggcgaccgagaaatgatatatagtcggcccattcttggagagcgttgtcgaagagtgaaagcgctctttcaacactagatgcatatcggcgatagttcttgtcttttttgagggaccctacaagcaccaagtaggatcagacacagtcctctcgtgcagttcctgaggtgggcgcataccttccttgccttgtagacgggagcgtgtcaaggagctctcggagctcgcgggggaattcgacctcggaaaggcattgggatcaagactcatggtgccaatgatggacgtaaaattgttgtgaaatttttgaactaccctccgtcatatttaggacatcgaggatgaccctgtgggaaagggggttggcggttgaatgttgaccagaggccaacgcaggcggccacgttcagttgttttgttccgccttgggatagctccgacttcgccgacgtcaatgcccagcaactatcaaatcggcaaacacaactaatcaagacgtgaaatatttgagctaaacaatgtgcatttaattccctgaagacccgcgacgagcgaccgcgtcaaaaagcgcatgcccgcagcggggatgaatacacagcaagacgcaaagaccgagggccaacagcctatcgagacccccaagcagccgtatctttccaagccctcagtcccagattatgatgagggtaatgagagctcagagggagaacggccacctttacctccgcgaccaaatacgttgagtctattgaacgatgaaacgggctcccggtcagctctacaggcagaggcaacgacggctatctcgcgaaccgatatcgagacacaaccaccggaagctcctggtagcacttactccacactagctgttcgtggtctggcccagggtccaaaagccagggcgagcctcagccagttggcgagcccgcggagcagcgaagctggtgactctgcgagtatcagaagctcagtcccaaatggtgattccggagatgttgaaacgctgtttatggactttgctgctacggagcctggtagtcaaaggggcgctacaggtctacttgacttccctgaattcgcggccgacgatatagacgataatggaattctgagcgaatttgaagcagttggcgaacttaatgaggaaggtgataacgaaggtttgggtcaataataaatcgtctcttgtttcataatgctaacgcatgtcagagctgctcctccaacggtggaaagcgaagcgcaagcactatgtgatcctatccgccgctgggaagccgatttggaccaggcatggtgacagcggcctgatttccggatatgtcggggttattcagaccattatttcgttttatgaggattcaaatgatcatctgcgaggcttttccgctggtgataccaggtttgttgtattgacacggggttctttataccttgttgcaatcagccgtatgatggaaagcgacaatcagcttcggcttcaactggaagcattgtatatgcagatattatctacattaaccctgccttctttaacccacctcttttctatgcggccctctactgatctatcgcggcccttacagggttcggagtcccttctctcatctctggcagacagtttcacgcgaggatctccatcgacgctactatcggctctggagtgtctgaaaatccgcaaacaacaccggcaagccatcaacaatgcacttctgaaaaccaaagctagtactcttctatatggcttgcttgtggccggcggacggctcgtcagtgttatccgacctaagaagcactccttacatccaggcgatctacagctcttattcaacatggtttttgaggccgacggagttaaagccggcggtggagaaagttggattcccgtctgtttgcctggcttcaacagcagcggttatctctacatgtatgtgagctttcttgacattcgggacgatatcgaaactagtgcagagatcaccaaagatgagtctgttgccattgttcttatcagtcccgacaaagaggctttctttgaaatgcaaggaatgcgtgatgctcttgtggaggtgagattacataattccacgcaatcgaatatggtatgcatgtactaatgatgcaatagcaaatggagagaaacggcagtctgaaggagatcaaaacggcaattgataatggccgacccgcaaccactgatatagttcctggaactgtgctacatcatttcttatacaaatcgcgtgcaaacgtacaattcactatgtcatcttatgtccctgaatttgcttcggtgactcgacggcgaaggtgagcaacatcccctctgctgttcacgaatgcttgcaatattaaatcattctgactgtgcctatagattgatgtcgatgtacaacaacttgcacgcgagcattcacgccaagaatacccatgtcaaagtacaccactgtgtttcgcggtcagccacttcgttcggatgggtaacccctgtattcgaattctattgtatcgccgagccgaacactaatcgaaatgcacttgcccaaagcgctagcaagattgctcagtgggtgcagcgtgaggaagagaggctattcatcattggcggtgcggtatgtactttgtctctgtggttattatggcacgagtgacaacactgatcatatgaaacaggttttctgatatcttccctacgtttgcactaagtcataaaacacttttgtggtcgccgggacacgaaaatcaaatcatgcctgaaagagagagggtcacatgagcccaaataataacactggatccgaactccgccagtcaatggacggagttctctgtatatactctctcgtgatttaatatacccaatactacgtccgccaaccttacatatatattgtttatggtagtatcctagtctacttttatatctcaagacctcttcgtagaatttactggtagatattctcggttcatcacgttgcattgctagaaaatccataatacgtagggaaaaaaaaataaaagaccacacatgtggactaatcgattgtgtcctctctcaagttgaagagctgacgcataacctcacccgacctgctgcgcagcgcatcgtgatacatggtgttggttataaactgcttggagttcttgatcttggcagcagtggctgtggccaggtcaaagtgaacatacatgtcgtcgatgtagtttgcagcatagactggcaccttgtttttggccagttgagcctcgtcatataggtccggccattcgtctgttgtagccaggatttcggctgcttctttgagctttgagagttctgagtaagactcgaacatatctttgaagacctggaaggtgggaaatggtgttagatctttctgttcaaacaattctgggttaggttgggttgggctatttaccatctcgccggtgaagtagatctcggacaacgagtcattgatctggaattgcgggttactagcgcgcagcctgtctgcagcccagagcgacggctttctatatttttgttagacacacatatgccaaaagcagacggcaagattttctttacccttggcagtagattgattcatgcagaatggcataaatgatatttttgtccataccgccattactgtcaatcacggaaagagtaggcagagtaaggaatccgaacatctccagatcgtttgagactctgaaaacaatgtctagactcgggttagtatttctactacgacattcacgagacaaagcaaggcttaccgtgtaggctatcaaaaccacctaagtcgtgttagctttattcgactgtctgaatcgagggatttaccgtggaagccgaacatgatgcctagttgctggaagcgagccggagtgagcaacccggatggcaatgcaaccttgtttttggtcaggtattgcatgatattcttaacacgggccacatcctcggggaacttctggtagtaagcttcgttcctctccttgaccttctctattttttgtgtcaatgtcacgaataagccactccgggaaaacagggaagcgcaccataggtcttcgcatagacaggatccggcccgttggtcagggggggaaggccaccagtaaggaaagcttctctcaagccctccgggctggaagttaaatgatatcagcgaggtgttcaagatccaagtatggagatcaatgagtctcaaaacatacaactttgacaagtaagtcactgcacagaagccaccgaaactttgcccaaggatactccaccggcgctggtcagccggatagtcctgtgtcagaacatcacggatagcttcgcaatcacggacaatgctgtctgcacggaagttcttgagatactcggcctgcttgattgcatctccctgacgagcaagggttcccgctgtgagagtcgaactgaggccagtgcctcgttgatccagaaagagcacctagagaatagttgagcatcaatctacaaaaggtagaatttaggagatatgacacacttggtatcccttgctgagcatgaattcgacccaggggtaagactgcggggcaccacatccaaagccagggccaccttgaagatagaccagccaaggaagcttgccctccttggcttctttgccctcttccttagcaggctcaatgggtttgttcaagcgactgatgcttcgtgcaaagagcctcagcgtgtccccagcaggcttgttgtagtccacagggacatcgaagagcagctcagaaacacgaagtttgcctagatagtgtcaaatttatcagtttcaacacccgtgggctaattagtgatgatacaaacctgagacattatggaaacgtcgctcaatcagtttcgcagccatgattgcgatgttgatgcggactgaaaatagagggcgcgttggcgacaagccgctttgcggagaaccgcaccattttttggtctaggccttcctgttcacctgcaatcacccagccgagtgaaggaaaaattgagtgtctttgtttttgtttattcccttgaccaagattgttcatagagagatgtgtaacttattgcatatatggatgagtagacggctttgaaaaaaaaataacattggatgtatgtagctatgcccgaacagatacatgtccgacacggtgttcgatgtcttcaacaaatctttctcagaatatgtgcttgatttggaccatattttagtatgtcctaggatggatacattgtagcaaattgacctgggacataaccattactttgttatgaattctgcaatcggttcgaaagcggaatcattccgcaaaaagaaaccatagaactggccgtctcacgagttcgcacccgagtgtttgttggctgcaagttgccggcctgcctttagcaatagtagagtcgcaggtagctgagcagccgcaaatccaaccataacaatcagctgcgtattgaaactaccagctaaaacgtccttcacctcctcttgtagaagaggaggtaggctttttatcgatctcacattctcaaggaataggtgcagttcgtgcgatgtcataacaccctgcaaacgatgcgttagatgaccatttaatatattagatgcaatggcaagaccaatagcaccaccaagaaagcggaactgaaccacggtaccagtggcaattgctgcaacgaaaggcgatgaactagttagccaatgcatcggtcaccttagtatcaggaagttttcgggagaacacatacctaggtctctgtcctcgacaatatatggtgtcgataacacgaggatgcccatggtcagacccattcctgtcccagcaatgactagatagccaatatctgttgcgtggaagcctcgagtactggcaatggtcgaaagaagcccaataccgacagtatggactgtacagcccacgagcagagtataaataaacgggatgcgtcccctagagctggcgatattgataatagccgcagcaactgcggcgatagcagaatacccaatcaaatagataccggcctccaaaggcgacttgtccaacagaagctgggcttgctgtggaacatatactaggacgacgttgtacggtgcgccgatgacgaacgaagaactaaaagcgtgtcagaagaaattgtacggtaaccgtggatattaattagatggactcacataagtattcccagccatggacgatcaaaaagccaacgcttgggaaatatggggtctctgcccgggatgcccgagatataccattcccaggcaaagaaagcgatccagcacacccccgtgagcacaaggagcgcaattgcatccctcgaagaccatgagaatgccagattggtttcattcaatacggcgactatcaaaaatgagccagccatcatcaaaaacgatcccattatatcaagattagcaaatgagcgatatgaggctcgtgtccggaatgaaggagtgtgctgatcaaggccaaagtgtttgggcatcgcaacgatgatgacagcgatcgcaatagagcacaatggtgcactaataatttagttagcatgcttttcaacacagatgcttagcatccacatacttgacgaaaaaggtccatcgccaggccgaattttccgcaagagcacctccaacgattgggcctatcaaagatgcaaaaacaaggcaaaatgacatgagactgctgtagattggaagcttcgttttaggagctatttcgtagacacataggatcgtcaacgcgtatgtaccagcgcccccgattccttggagagctcggaatattatgctgcctcggtagttagcctctagacagaaaatgagcgcaggactacgctagacatacagttggttaactgtctgagcaaacccacaccccatagaaaatgcgagcagaatgacaagagcagcgattgtagtttgtttcctgccaagtatatcgctgatttttgtccatattgccatagaccctggaagtattatgatatcagtaatgagagagatagagactgtgggagactatctcaagacatatgttcaagaagaaaagaaacatccaaagagtagagaaattattataacatcgcatttgtatcatacctgtgtaggtggctagatatccagtgataatccagcttcttttctcgaagccttccaaatcatctgtgatactcgtgagagccgagcttacaatcgtgacatccaagttggagaggaaaaatccaatcaagagtctatacaccatcagtcttcgttagcaaaacccaatggcacttgactgagcacataccctgtggtggtaagcactagtctccatcctgtcgggtaaacaatttcacttcctggggaaggtgctctctgtgccgaccccttttcttggatgtgccccctagcgcgatctttgctagctttattcgaggtcggctctgcgaacttgatgtggctagacatggttgtcggcctctcagtgatgggtgcgtcaagagtaggtgaagactggagtggcaggcatcgttgcaggcgagaaagttttgaacgtgaccactgtctacgtaggaccaagccccgcgtatcttcaccccaggggcttcatgtggaacgccaggagacgcgcgatgacagaatgtggaatatttacatgcaaagaagggtgatccgcgtcgatcattgaacctagatatgctggattggatgtggcttggcataaatttgcttttctggggcatgcgcgattagatttggaattttgaactgccttttcgactgcttttgatgatattattctccatctttttaactgcgacatggtctggaaagaagggccctcacccgttctattttcctaatctgagacagattctccttgctcagggatagctattcgcccctggaatatgcaaacatgctatacaacatagataaggtcgttcaatgtagtcaagtaaggaggacttgtgcactgccaagctggattcggagagtaacgcgagcttgtagttgacttagcaacaaataggcgaagtccagaaatctctgctccgtaccatcgccccatacttctccccgaggttgacaggataattaggcgcaattagcatccaaggagatgtcaggggcaacatgaacaaagggcctaatgagaaacagggtaaaaccagccttaaagattgcctagacagtagttacttcgtccgtcatagattaaataaatctactcagcgcctgaggcagccaagcaagagtcactatggacatctctaggtacgaagtacatgcctccatctccacatcgcctgtctgctccaaaacttccattgcaagatcactagaagctgttcgaacttcggacttcggacatcgacttcaccttgccccactcatcccgctttccaggcttccaacgttctttcgggacgtgcccaggtgtcttccaatgatatctgtttacatctatctatttcctatgcgagatcagaaggcatcacatattgtttctggaaggtatagccgaacgttatagggagcagatcccgagaccccggcattgtataaattggccagattgttcaatttcccctctccccaacacacctttcggccatgcataaccaattccaacaagacctatggaaggctgcacagggaccctgggactcgggaattctccctagctctgagaacttagcgcgagctagagcttctctccccgcgacacttccgaatacaggatccagtctcgaatttgtccagcggcacattgtcgacgatattgtcccggcattcaatgggggaagcataagtgccaattactatggatttgtgactggtggaactaccccagcagcgctcttcgcggacaacgttgtatctgcttacgaccagaacgtccaggtccatctcccaaatcactcgattgtcaccgatgtggagtataacgcacttggtctccttttagatcttttccaactgaagcgttctgtctggtataatgggactttcactactggggccacggggagcaatatcctcggcctagcatgtgggcgcgaatttattttgcaaaaggcggcgcagagaaaaggctgtcatctccagagtgttggtgaagagggcttgtttgaggtattgaatgcactgggtctttccggggtgcaggttttatccacgctgccacactcctccctcgtgaaggctgctggtgtgctaggcatcggtcgttccaacgtacacaacatctgccgagccgacgacccgctccgctttgatattgataagcttcagaaagaacttgcgagaacagacaaggttagcatcgttgcaatatcttgcggagaggtcaatactggtcgttttgcaacaagcggtgcggatttgagagaaatacgccagttgtgcgacaagtatggagcctggatgcacgccgatggagcatttggaatatttgcccgtgtccttgatgaaagcccagagtttgcaacaatcaagaagggttgcgaaggaatacatctggtcgactcgataaccggtgacggccacaaacttctcaacgtgccctacgactgtggctttttctttactcgacacccgaatgtggcatcgcaagtattccaaaacgcgaatgcagcttacttggctgctggagactccgatggcccttccatcccctcgcctctaaacattgggattgaaaactctcgtcgatttagagcattaccggtgtatgcatcgctattgtcatatggcaagtccgggtatcaagaaatgctggagcgtcagataaggcttgcccggaaaatatatggatggatattcgagcattctggttatacagctttgccagaagcattgtccaagtctgagttgcttgatcggacatttatgactgttttatttcgcgcaaatgatgaggggttgaaccgcgagctaggaagcaagatcaacgagagctcgcggatgttcgtctcgggtactagctgggatgggtcccctgcttgccgcattgcaatctcaaattggcgagttgatgtggagcgagactttgcgctggtgacagatgtgctggcaaaggttgcccagagctaggggaattaagacttagaatctcaacgattggacattcaacgcttaaatctatttttttttatatctctatagagggtatcagcgacgacgaccagctcctcctatattctcagtacggtcagacatgctaacaacctctccaatacccgctgcttcttgctcatcttccagagccatgatctcctctcgactatcccaccacttttcttcggccacagagaacgctgctttgcgcaattccttgattgacttgtcaccggactgttccttctccttgacaatctccatcatgatattctgccattcttcagaagtgcggctgaagaattctcgcaagctttcgaacggccgaggcaatggtcggttgtcattgaaagtttgctcttctggctcctcaacttcaagttgttccatgtccttggtaacagatggcaccgtcacatctgtccgggcaggagagggagcatcaagggacatcgcttcggcgtcagcctcatcgtcttcatcctcatcgtcgtcgtcatcttcgtcatccatttcttcgtcactgtcttcggcttcgttcaagaggttccaattctcaggctccctgtagaataactccttgacaccatccagcttgactagatcaatggaatacatatcgtcgaaggtgaactctcggtcacccttttcaaacgtaccaccaaagatgaatagggtatcatcttgcactgctagctgggcattgaatcgccggtggggcatttcgaagcgaacaaccgagggttttgcgggttccacaggctcctcgggtcggggcgggcttgcttccataacgttatcatcttcattgtcccgaattccaactttagcttccagggctttgaggtttgccaaaagctcttcctcatccgctttgcccctatttttagactttgcattttgatttgcctgctgctttttgcccggcgcgcggggacgtcgcagactcaacgggaagaaacggtttctgtcgatagtccaagcaaagagagtatcgaagaactcgctgtcaatgccctcctcggttagttccacgtcgtggacaccaccaaacatgattcctcgacccttgtggtatgccatggtagtgccaacacggggcgggttgggcgtattagcgggcttctttcgtcgttcccatcggacaacaggtgccgttgacgatggagcctcagctgcagggggtgtgattctcaagaaccaagtatcctggtgaaccatgggccggagagccatcttctgggggccgccacccttgccttgcttaccaccacccgcagctgccttcactcgggagtagcccccgtagagaacagctccagtctcgtgcggtagcagagagaatgatgagcgaggatcgggtttttgggaagcaagggtcaatgtggggttgtaccaagtatattgattacaatcataaatccacaggtcctgcaagtacttagtctgctgggaggtatcctggaatccaccaaagaggatgatgtagttctgtctcgggattagctttatccagaagacatatgctgaattaaaacacataccttgaaatatgtcatgcggtgaccacttctagcgggaggacctttgcctttaacctcgagacgggtccattctcttgtagctgtgtctaagtgccaaaaatcattgtagtgataaaatgtgccttgtttcggcgacgagaactctcctgctgatagtaagtctccgcacaaacaatttcaatatacccagcaagacaaccttacctccaaacatatagatgcctccggagtttcctccccggcaccatgcatggccacttcgaggaagagggctgttgggactagtcacttctctccattcgctgcggtcaatcaaatagatgaaaaggttattgaagaaagtggcatgcgtcccgtcaaagtactctccaccgaaaagcaacagctcgtttcggttcgacggagatgctagcacggttgaagacgaacgtgaaaccgggggctcggaaggaacctcagtgacctttaagaatttggcctgttcttcggcgtactgggctagaatggcatctaggtctgcgtcttcagcatcactgtctgcatcctttcccttagctttggacctcttttccttctgcgcggacttctttgattgcttagccgctacacggtccttgtgctcggctgatttcttagtctttttacccattttggctccacgttggattcagaaagtgaattttcgcgatcttcttttcgtggggcagaaatcatgccttttccccacaccgaattaattgcccccctccagatcgatcagatattcgtctgtaggcgtgttgcttccaccattcgattttatttacatgtaactttggcaaatataagaaataggataagaatgattattcccactcgaatttaatttcttagtcctatttgaccgagtaagttgaacgtagttgctgctatagatcgatttgtttgaccgctcacgtgccgacgcgtcgatatcgggttcgcgattgtgcccatcgccccaaacatgaagatcgacggccatgacagcaacaggcccccatgacgaagaataacttagcaactcatctcaaatggttgttaacccaagggaaacctcttaacccccctctggcacaaaccggcctgcccgaacgcaacaaccacgcattaccacaattgattccccccgccgccgaactcgcggccctggatgatatccttgaagacacggaaaatgagacgaatggttcaatggctagattgttaccccaatcggcgagcaagcctcgattgctaagccgacatgacacggtccccaccagtactctgtcaagtacgaagaaacgggattcgccaaaacaatcaaacatagctcgaggtacgtaaacacacgagacgagtcttgcgggaattatcagactgataccgcctgcacggtgattagagtccttccgagaaccaccattatcatcacacaaaccttcccggcaaaagtcgactccatcgcgatcagacagtttccacgcatctggccataaagatattgaatcgattgatttgacaggggagcttgatctgtccacactatcctcggagactatcctggcgggtgagccgcgcgggtcatgtgcacaagaaagtaccccgtgcggaactcgtgagaaacgcggcaagaagcgcaagagtgacgagtatacgtctgatcttctttccccattgaaacatgcgacgaaagtgcgaacgccctcgaaagtgcgaaccccctccaaagccgctctaccccccgcccgtagagacattatatcggaacagcccacagtcccacgtcagacaactcaaacaacccaaacaaatcccccaagcgcggcgaaacgacctgaatatcattcacctactgccccacggagccatcggaaacgagtgatcgcggattcagatgatgacgatgatctctttgatgactgggctgttagtgaagatccggccgataagatgatcctcgatgccggggagaatttgtatccaatacttcccgagatgagtccagcggcggacgagaaaatggtcgagactaagcattcacgattggaatgtacgcccaaagcaccgttcccgactgcgcaactatcgactcagccgaagaaaatggcagttgtcaaagaccctaccccgtcgacgccttggtcgaagccgtccagctcatcacaagaaaaggatccggatctcctgaagtttttggctcttggaagcaatgccttcggctatgcaatttccaaattgaggtctactctgcagaagaattctgagattgtttatcaacaggccatggagggacagccagtcccggaattgatcgctcaaaacaagactcttgtcgctcagatcgaggcaattgaattgctgcaaaagcatcaaaacacgcacaagggcagcgtttctcgcaagcaagacctgaagcagaacttgatacgtgtgatctcacaaggtctagatccaacaaccatgccagaagagcttgcgcagagtcgagcagttgaggcagagttggaacaaaccgaaacaaaaatctgtcagcttctatctcaagtcaatatcctcgaattagcgcacgattgtccacctgaaccctcctatatgaaacccacgcagcccaccttcgaagcccatgcagtcgcacaggagcccgctcttgtctcttcttcgcgtgccgactcaaacacagaattccgtagccaacagcgtttgcctctcacaagtcccagaaagaccaaagacacccgtcagccagatagctatgaggactgtatttctcggaatatgggctctccactgttggattcgatggatattgatgagttcgactggaatgtcagcgacgatgacatattagaagcggcagtgggcttcgatggtgctcaacagatacctgttcgcgagcaagccagtcaaagccgcaaggtttttgcggagacctctggcaacgtccccaaggtgcccgtcccgaagaagtcgcccggtcatagcgccttctggtcaaaccatccatggtctcaagaagtaaggaaagtgttgaaagaccgattccacctccgcggattccgacccaatcaacttgaagccattgatgcgacacttgctggcaaagatacattcattcttatgcctactggaggaggaaagtcgctatgttatcaattaccttctgtggtaactggcggacgcaccactggagtgacgattgtgatatctccattgctgagtctgatggaggatcaagtatcccacctgcgaaaattgaacgtcaaggcctttatgattaacggcgataccgaccaacaggaaaaatcatggatcatgagccagctctcaaatgcaggtggcgaggggttggaggtcctgtacatcactcctgagatgcttagtaaaaaccaagccttgattagagcccttgagaggcttcacggaagaaacagattagcgccgnnnnnnnnnnnnnnnnnnnnnnnnnnnnnnnnnnnnnnnnnnnnnnnnnnnnnnnnnnnnnnnnnnnnnnnnnnnnnnnnnnnnnnnnnnnnnnnnnnnnnnnnnnnnnnnnnnnnnnnnnnnnnnnnnnnnnnnnnnnnnnnnnnnnnnnnnnnnnnnaaaaacagattagcgcgcctcgtcatcgacgaggctcactgcgtcagtcaatggggacacgatttccgacctgactacaaagagctaggagaggttcgagccaggttccctggtgtaccggttatggccttgacggccactgctactgagaatgtcaaagttgatgtgatgcacaatctcaaaatcactgattgtgaagtgttcctacagagtttcaaccgtcctaatctcacctacgaggtacggtcgaaaggaaagaatgatgaggttctagccagtatggcggaaaccattacaagctcataccggaatcagtgcgggattatctactgcctctcgcgaaagacctgcgataaggttgcagaggatctacagaaaaagtaccacctcaaggcaaacgcttatcatgcgggtatgtcagcaaaagcaaaatcggaggctcagaggaactggcagatgggccgagtacatatcattgttgccaccattgcattcggaatgggaattgacaaagccgatgtgcgattcgtcatgcaccacagtatcccaaagagtctcgaggggtattatcaagaaaccggtcgtgctggtcgagacggcaagcgttctggctgttatctttacttcggctacaaagacacagcaaccttaaagcggatgattgatgcaggagatggcagtggtcagcaaaaaggtcgtcagaaacagatgttgcgaaatgtggttcaattttgtgagaaccgcagcgattgcagacgagtccaagtcctcgcctattttgcggaatacttccgccgagaggactgcaataacacctgtgataactgcaagtccggtttagtgtttgagcttcatgattttactgagcaggcatcctgggccatcaagattgtgcgacaattccagaacgcacaggagaaggtgactgtgctctactgctgcgacatacttcgtggggattgcaaacggcctaaagccccagagcatcgcaagatgccggggtatggaaagggatctgatctcgaccgtggagcagccgaacgtctgttctaccggctgctaggtgaagacgcattggccgaagacaacgtgatcaataaaagtgatttcgctgttcagtatatcatcctcgggcgtcgtgcagcagaatatgagagtggccagcggcaaatgaaactacaggttcgcgcgtcaccgaatagtaagaccaaagccaacagcaagccctcagctgctacgcaaaagaaaaagtccaggaattcaggtggcgatcctcagtcaaccatggtatcttctccggtgcaagctgctcaaaaccgccgccttgaccgttatcaatatgccggtgctccagccgtaccttcctcgctcgatgaggatagtgatggctttgaaccgattcgaaccaccggcaagtctcgccgcgcaaacacacgcgagatgggccctccgattaccagcgatcagaagttagatcgacttgatcacatgcatcgtgtagttgtggaggactttcaagagcacgccaaaatcatgcttcaggacgtgagtaatcgctgtactcattagtacatcataaagaaactgactattgttatagcttgtcgttaagaagggccttcggtgccaaccgttctctgaccaggtgctacgtgatatgggcatatcttttcccacaagtaagtacgatcccttgatgggaattggaacaccaggttaacaaggaaatagatctcactgagctttctgcgatccccgacatcgaccaggataaggtgaagcgctacggccggcagatactgggactggttgacaatgcgaagcggcggtacctggagatgacgcaggaagcagagaccagcggcgttgttccggatcccaaccaccataatgtcatcaacctcagcagcagcgatgagtatagtgacgacgatttgttcatggatgaggcttccttcaatctggacaatccagtcttggccgcacccagcaatgcagttgaaaatatcaccagtcgctacttccctccggcagcatctccgggatatgactctggtgacgactgggaatctggcgcggcgcctcctggctccaagggtcgcaagcgccagcctgccagtggcaaacgaccatcacgacggaaatatggctccgctggaagctggaagggcaaagtcgcgcgaccaaaagtcaaatctggcgatcgtcctacaagccagtcatctgcgccgcgaaagaactccagacccaaagctcccaaatctacgattggaatgatgcctatttgatgttcttcttattgttctttcccatcttttgtcgggatgtttatgattggttcggcgtttacacaagcatctctaggtgttcttttctcacggtttgtagggagtcattcgaaggtagtctataggtgccgggttatgtagtatttgaaatgttcacaaaggaccaggatatagaacgatacacatccatgaatcaataataccattttgttactcaatcgtggaatgtccctcattcaattccccagtgagcgaccaaaatcaatcaatcgaagccgccgtgcatctcgagggtgaaactgcgcgaccttggctctcacaaggaatcttgaagacgccgagtcgcgctccaaatcgatataggtgttagcctccaacatagcgtcgagaagaccatgcatctccttcgcaactgcctcccttttgtttgtgggagcctcatccgcgttccgtttcatgaacttatcaatccgccgctgtgatccatcctccgtttctgtcggctctttctgcttcttgggcttgccgtgtgccgtataacctgcctttagcgtagcatctgacacctcaaaagcatcgcctacagtcgggccgcccagatcctcggcagcaagcattggagcaagagtctcatcgatgaacgtatccaacgagaccttgaggtttgcagacgtgcggtccagttctttattttgctctttctgcagggtaagctgctcgcgtgccacctgtgatggagtctgctcttcctttctcgtgtttgcattgcggattctttgaattcgctctcgcagtccgcttgcgattgattgagagtcgcgtagattagcctcttcaacccgcaggcgctcgcggtctacagacagctgttcagcagtcattgtgacagagaccttgttttcttgaacaagacgtgcggtttcttctatggctataagtgatggcagcaccgaatctgttgctgggagctcatcgtcggacttaagaagcgagtcgtaggctttcctggcccgtcgggcttgggaaatacgggcccaggaatcggtacccgtttctgttaaatcaagggaactgagctcccgcagctataactcatgtcaatcgaggcgtcctactataattggaatgacatagcatgccttgttcaattcatcctgctggcgtttgacttgctcttgaagcccttgcaaggttgcatctaaacgtcgcgtgtaaacatgcaatgcagtctcactgagaggttcttttgccgcttcgtgttctgcttcttggcgcctctgtgcgaatttctggatcttctgcacggtttggtcggcgatatccatgcttattttggtggagtgacgcaaaatgcaaatatttccttctagaagtaaaagaaatacttttgatttagagctccattgtccttgagacttgctgtaaaatgtttgattgaagcctaagagacaatcaaaatatcgaacacgagcatcacgcccatgcaacattcgcgtcgacgtcatgtgaccaggtttcagcctcgacttccttcccccatcgttaacttcacctcttctccttaatcaccgggatttgattttcatcgccttgatttcttcccttcattccacctttcatcgccatttcaccacattttcgtcaataaagctatcaactcgtcgatagcgagttttagcccacacccttgacctcagattcagacgttatcggaggctacagtgtggtacagcaggcaacggtttctggcgcttgatatcttgcttgcctcatttcctatttcccatcgcgttcacccaaggatcctatctccaccctttcgcttccttattcatttcgagcatctcggcagatcccgtgaagcttccccagttgtgacagcaaagccctctcacacttgaatctgcacttcttcccgtcttacatcggcactgcctcagtaccacctttccctcacagcctctccaatcttctcaaagcaccaatttccccttccgatcgccagcaccagcaccttccgtgggaaattctggtgtacataaaacgatcataaaagaagaaaacagatttcattcttgacaccttccgatttcacttgtaagtgaaaaacaaacagcagcacagactatccaagatgtcggcttctccatccaaccttcagtcgaccaagcgtcctctcgaggacccttcgtcgccgtccggtcccaatgaccagcctgaggccaagcgcccggcgctagacaaagtagtcaagagcgatgccgaggcggaaacagatgtatccagtagccaggttcctactgtcgtcgaaggtgccaaggatactcagggagatactgtggtccccgatgcgcccactggcaagggtctccctgtcgacacccaacccatccaatcaacagcttcccaggccgatcgcgcgggttctgatcaaccaccccaggacgagtcgagctgggttcatattcgtgcggtgatctccagcccggaagcagccaccgttattggaaagggaggtgagaacgtgtcccagattcgtcgtctgtccggtgccaagtgcactgtcagtgattattctcggggtgcagtggagcgtatcctgacagtcagcggtccccaggatgctgctgccaaggtaggttttttcttccattcaataggtttgttacgactgttcgattgctaatgacaaatattaggcgtttggtttaattatccgtacccttaacaatgaacctctagaggccgcttctactgcacaatccaagacgtaccctctgcgtttgctaattcctcacattctaattggttccatcatcggcaagggtggcagccgcattcgtgagatccaggaggcttctggtgctcgcctgaacgcctcggacgcttgcctccctctgtccaccgaacggtcccttgtcatcctcggtgttgcggatgccgtccacatcgctacctactatgtcgctgtcaccttggtcgagcagctgtctgaacgttacggcggtcccgcggcctcggcatatgccactcgcagcggcggtcctgccggtgctgttcctggtggtatgcaggttgtgccgtacgttccccagcccgccggcggccaatacggccatcccgacacgttcaagcgtcaccaccctcaccctaaccgtgccggtggtggtgcatatggtgttccctacctgcacggtcagccagcccctgctcctgttgctcagaccccaatgcacttccccgccgctccccaggccccttacggcggcgtaggcccccaccagcccgctccctttgttggtggccctcagcagccgacccctggccgtggacctccaacagcccctgcccctgtcggcgctgccattcccggtcagccattgactcagcagatttacatccccaacgacatggttggtgccattattggaaagggtggtgctaaaattaacgagatacgtcacctcagtggtagtgtgatcaagatcaacgagccccaagagagcagcaatgagcgtctggtcactatcaccggtaccgcggagtgcaaccaaatggccttgtacatgctctattcccgacttggttcgtctcccccttccctaggtgaagctgtgcatagctaggttctaacggattgaccagagagtgaaaagcaccggatctaagtcaagcagcgtaacatacaacgcttgctgagagttttattgcgaggttctgcccaaaattctacggtggttaatgaagtctccttttgtttgccttcgctttctctcagggcgttattccttggttctttctttactttctcgttgtatcttattccaaggcgtgtttcatttcctgccattctaattaacaattcccacacaattatccctgaatcaagtagccctttccctttccactacctgctctaatcaccaccgacatattctattatccacgcaacacagctcaaatcatccatgccccagcattaatccatggcaccaagctctccttcgttcctctctcgcttcccctttaccgctcttatttctctccccttcccccgcctaacccgaaatcttttggaaactaacatgtttcgtctccaacccaggaataggcggcaacatcttcttcctcagaggcgccatactgcgggcatagttctctgttttatcggccttgcgatgcgcctccatactgttccagccaacagccaggaggtgcgcgaaagcttgcccactcggactattctcgtgcggcagcttactcggccggtcgacatgccccatcgaccatgatcgtggccccattgactgtggtagctgctcgaccatcgcgatgcggaagctgatcaagtccgcgtcgatctgcttcattcctgacacttcgagatcactcggaaatgacagcgtgcacagctcagtcacggggtttttggttagtgtttctgtggcagagagtggtgggctgaaggtgacgcgcagtgatgacggtggctggggattgtcgggtgccaaaaactcgttgattagttgaatatctattgtgctgcgagggtcggtccagtctgttggtttggttaggctataggccagaggttgtaggtttctaggggtgggtatgtatatcgtagtttgagaattgtttcagggatgctaaactcacctacaacccagacgatggtgtctttgtcttcgaatgtgtatccccaggatgagcgcgcatgaccgctttggtgttgggtcgcctggaagatcctcatcagactcttgccttctatgctggacgggtcttcaggcttgacggaacgtttgacgcggaagaagacgacctggctaacgattggagacatgctgggatggtgtttttcccgacaaatcgtgtagatgggagagacaggcctagagtatcaaaatacagatggctgatgtcacgagcacatgatgtcacttgcatcgaatcccaattaggaaactaccctggtgccttttccttccttcctatcttgtgcagttggtatctaccttggaagtacatatgtaggtgcttctctatggtctcctcttctctcttcctttctcttctcttcccatctctgctcgaatctgctcccctcgacaccatgcagtcatacacactaatttcccggttatccaattcattccaagataaaagcaatcgactgttcttattctctgctttttcaatcgacgtcgtaaaccctagcttcacacttcccttatgaaatggatatgcttctggcaccatgtggtttgcctcatgctggtacatttcacagccctcgcattcttgatcgtgcggcttcttgtcttatcccaaaacgaaccagtggctcatatcatacatatgtattaccattggttgcgggcactggtgaactctcgaatccaaccattatcacatcgctgtcaccttgcctgagcatctcttccgaatcaatctggttcctcggtgaaatcgaactatcgccttggaaactgcttgcttgcctacctgaagtggggggatactccaaattgaatgtggactgctatctcattgtcgcaacatgagttagggtaagaagatgcagaggatgtcttttacgatatccgatatctgatctctgcttctttgacactccagattcttccatgttgcggtgcttgactaatttatccggtatagctatcttggatttgagattccgttgcctttctatcaaatggcagttcatggcttatggtggcggctcaacttcgtcgagttacttgaatcgtagctatggcattcgatccatatgaatctcatgggccagaacttacactacttgtgaaacttgatatttttccctgaacatcttgttcatttttagatgctctattaatctgtcagatgtccccagaagatcacattgactgcaaacttcatgcatctccccttaattccatactctcgatcctggcagaacacgtatcgttttcctcgtcaactaaaagaaaatcacactccggtcaagatgaactaactctacgtgcgatgatttctctgggccaccagagtgctaaagtcttagcctgggctatgactgcatcgttgtggttctcatctctatgaaatccacctactggtagcgatagacataagtatctatagtgatgctgtgcgtaagcggaaatattggcgtcatagctttgaatctgttgagccacagactccatcagctcttcgtcattattggtaagcttcattgctttcggaatttctatagtaacccaaagagctatatcatctttagggtctaccagacactcgaagcccatcatgaaaggacaactatcagtcgcgcgtcctgccattttgctggttggtagatatgatatgtttaaggaaaataagattttttgcaaagctatttagaggaatgctggtggtgaatatagagagagagactcgagggcttcggggttttatatgagttctgcgccgtaggctagaacaaggacttttgtttggtcattagtacaatggccttgattgaaaccccttgaaaccactttcgttccttgatcgcttttcttactgctttcctaactatgtcattgaccgaatttcgttctttgccaggcgttagggatacatctcaagatacaaagccgatgaagtctgacttatatgtcggaaagacgaaagcaagttccaaatgagaatcctacacttaacaataactagccctcggcaggagctaagctgacgcaaataactgcatgtagataatagggtttgaatttgatagttaatttagccactcactgtgacgctgaaaaaagatccgctacatacgtatctgcatgccatgactccctggtccaattaagaccatctaccaaataacaatccacgctgaaagcaaattcccccaaatatgggatcggaatctttagagaaaacccaaataaaagcgaagcagaaaaaaagaccgaatctaccagtcgacgctgcgcacctttgcctgcttgtcctcgaaggccttcttcaagttggcattcaagcgctggcgacgcgacctgttggccttatattggatggcatcttcttgcgggagggcaggctcaccagcaccctccacgctgcggagacggctctgtctcacagagccattgatgctggcccggaagttgagaccgcgtgaaacggaatcgggggtgtgataggcgctaccgtcaatcgagcctcgcgacccaggagtcatgggtatacggccagcggcgttcttgcggggagtagagaatggggagccttcacggcttggaggccctgtggagacaatgtccacgccgagcttgcgcatctgtgcctcgagaacatcgatgtctgtgctctttccctcggccatgctcatcattgtagcaatagtcttggtgacagcctcgacggttggtcggtttctgcctccgccattcgtttgcggaatatcggcgattttggcacgcaggagagagactgcctgttcgagagcggtaatctcgacctggatattcgtgaatgtggtgcgcagatcatgttggagcgcaccttgctcagcggaaagtggtgcttcgagaatagcgccgatgtcagtgtgtgcgtcaagagtcttgcgaatgcttgcgaactggcctcgcaaggtgacaatctgctttgtgagcaggtcacggcatgcatcgagcttttcatccaccccctgcacccgctggttgtccaatgatcgcgaaattgaagcaatcaactcttcaaatctctcaatgtccttgaaggtcatcttggtgtcgagaatgtcagcgggctggtcgccgttcatgacgatcacccactcatcaatatcagagagtttcttgggctgttggtacagaaggaatcctgccattgacctagcatttatacccaaggtatctaccatagagttgatgtcacgatagagccgttctacctgtccggcaatacctggctttggagtgtcgcccatgtagttttggtggggcaagaatgggtccagggtatcaacaggctcaacgggctgagccagttcatcacgaagtctatcgtcctcgtcatcgtctgacaaagataaaacatcatcttcctgaatttgagctgctgcatgtgcacgtgcttgcttctcttgctcctcacgctcctcacgagcaacatcgctggcttttctcaagtggccgctacgctgggcgatatgggtaagagatgccttacgcgaatgcaatgcgcctgtggaccccttacggctgtgtgatttctcggagaatagcacgttcttcttccctccgacccgaactggactcggtgaccgatagggctcacgattacctttcgcgatagagaccgggggagggagcagtgcctgcttagggatctccccgaatagctgctggggaaggcggcctttgtcattcacattgcgagcaggactatcgaagaatcctccggtggagctttgctcggaagctgcatcaaacgagctctgagctgactgcttggatttggcgattaatgcttcgtcatgtgtaatttcttcgccactatcactgaagtctgacccggctgcggcctcagaatctgcatcggagatacccgattcatcagattcatcagggattggaactgcctcttcggaaggtttggtctttggctttgcggtgaagtcaggaggcagaggtgcgtcctcgggaacagccgcagcctcaacctttttggactttgtcaggaagtctggaggaaggggagcgtcgtcgggaacagccgcagcctcaacctttttggactttgttaggaagtctggaggaaggggggcgtcgtcgatcttgggggcaggtttcttctgattgaggaaatcgggtggtagaggggcgtcctcttcaggttttggtgaagccttcttcgccttagtgaaatcgggaggaagcgggacatcctcggcggagcacttcgacacattggaagaagcagaagtatctccagcggcataactagcccggctggtaggatctggtggcaatggtgcctctacatcgagacttgatgtgttaggccaattcttcttgggtgtctctgtcttatcagacagtgctgacaatgggctggtcacgcggttttggtcagcactactgccaaacatcgagaatgccgacttggtgttctcggccgaaggcgttgtctttgaactgaacgttgatgtaggagtctgtgaagcaggtttgcttgccccgccgaaaattgaaaatgtctccttattcacaggctcgatatcttcagtgtcatccattgattcactcggtgatgagcttcccttgcggggcgttgacaccatctcatcaaaggagccaccaaatgagaacgcaccagaagaagatttgtctgcatttggtccatcattggcagccgaaccatcgcccttgaaggcagatttgagctcaaagccaccttgtgcggcgccaaacggattcttgacttcattggatgcttgaggcgggaatgaggtctgggtttgagacttggctccaaagggcgaggcagaagaggcgtttgcgaagggcgacccttttgactgtgtggccgcgaacggtgatccacctggctgtttcgctgcgaatggtgactcccccggctttgctgttgcaaagccactgaagccgcctccaccggagaaggcgctgaagccagcaccgccagatgctacacctttggcaccgaatgggtttgccggggaggtagactgtccagatcctatagccccaaatccagatttcccgaactgtggctgtccaggggtactaggagtgccgaatgatgcgcccggctgagagggggtcccaaaagcgggagcaagggccggggacgatggctttccaaaggccgggctagggcttccaccaagccgggacggactaccaaatgctggagcactttgttttccaaaagcagttgcacccatggttgaagctcccaaggtagatgggctaccaaagacggaagctccagctggcttcccgaaagctggttggccaaatgccgatgaacctccgaacgatgactggccaaatgcaggttgctgtgccggggttggagctacagcctgtggctgagagggagcttgagttgcctgaccagacgagatcaaccccgaatatgggatattttggcgaatggaatcagcgtaaacgaaccaccaagacgaaaggataccatcattatttagaagaagaaccccaggaaggggcgtcgagctctccaagatatcagaacctggaagcggtgcaatgacattttccgtggctgacaagttttgtgccaggccgatgacggatgtctcatctccagagtccttcaacggcacactagcacgtttggtgtcgtcgcttacttctgtggtcatgaactgaccaacatgaagtttggttcgctcatcgttggccagaggctgatcagatcgcgtaatgagcccgagatcagttgacgcagttgacgcgacaatcaagacatctctcaagtgaggcttgtactctctaattctggtgataaattggaatgcaggaccacgtttcagcataaagcccatagtcgagcagacttctggcaatttctggatgaggaacggcgcctgcttgcggcgggttatgatgtagtatgaagaagctgggttcattcccatatcatcctctgaaacatttggtgtgtatgtcacaaagaaaacatcgttctcaagccatgcgattgatgaaactgtataatcgtaagcaaaaacacatatttggttctgacaatcattcgaaacttactgtggcaatctccctccaggtcagatggccgaggaatttcagccttcttcgttccatctggggtcatctggtatccagtgccatcggccaatccagcaacaagttgttttcctttgttgctccatgaagcacagctgacaccatccttgagaaccgggccattgggtccaggaactaggctcccagccttgagatcggcgataagaagctcgccattaacggtgaccagcgcgacaagtgtcgaggaaggctcagggtttggtgccagtgctcgtagcgacacgccattcgtaggaattgaaatcgctggctgcgcatttccttgtgtgagggtgtttgtatcgaaaaccgagattgtggagccattctccgtggcgagaatcaagccgtcgtcgcccggtgtgaatgccacatgagtaggacgagaaggaaggggaattgtggcgataggctggaatggcttcgtcttctccatatcttctccagctggcgcctcgatggactttctgacaacatcagttgtacttattaccagcgcatctgggccagcgccaacaacgaggcctttggtgtgtgcgacagccagaagtgaggaagtaggagcaggaagcgcgttgtcgggccatgccgttggaaggaagcggatatttgcgtccccggagactcctttgaaaccgacttcctatagctatgttagacaggatggcggtgagttataactgcggcgggttggacatacatcggtaaaaacatcgggaagctctgaaccaagctccgcagaggcgcttcccccagcagggttggacgcaccgaagttgaaagccattctgagcttttcggaattgaatgtcgcagaaggagaacgtgtgctttcgcttagaggagagttatgtctgaaagcattaggtgagggtgagttgggaggtgtggagagtgagcgtcgacggagtgatttaggactccgggagagagtctgagagtatgcgcgaaaatcttgagcttgcgtggcttcccgggaattacaagacagacagagagtaaaaatggacgcaacgggtatcgccgacgcgcaaaatgttggaaagagcgaagtcacaagagactacataaagaagcattgaattcgaaaatgatggtccggcaaaaacaccttgtttatgcctgataattgaggctccaatttaggctgcgggagcttcgtcactccagacagctcacttcctcttcaccatctccagcttgctacctcattcgtccatccatccttctcgatctcctctcatattcgaatttcgctctcttttcttcctatacccattctctatcctgataatcagctcagctggtcgcgaacaccagcgttctcacgatgccgggcttcgacttcacaaactacaaccgcaatgcggcgcttcacgccaggggtgttccccttcccaaggccacaagtaccggtacaacaattgtgggctgcatctatgataagggtgttgtggtacggtcccaagagatgcaaggagattcaaaagagctgtgacccaggagctgactcgaatcgccataacagattgcagcagatacccgagctaccagcggccctatagtagcagacaaggcaagatacaccgatgagattatgtacagtatccttttagagggtctaacatcctttgtctctagaactgcgagaagcttcactacatcgcgccgaagatctggtgtgctggagccggtaccgctgccgataccgaattcaccactgcgctcatcagctctaacgtcgaactgcactcgctatccacgggccgcgacccccgtgtgatcacctgtatgacgatgcttaagcagcacctcttccggtaccagggccacatcggagcgtacctggttgttgcaggcgtggacccaaccggcaccggactgtacactgtgcacgcacatggatcgacagacaagctgccgtatgtgacgatgggatccggatcgctggctgcgatgtcggtgtttgagtcgacctggcaaccagacctggaccgacagggcgccatcgacatctgcgccgaggcaatcaaggctggtatcttcaacgatctgggctctggtagcaatgtcgacgtgtgtgtgatcgagaaggaccagccgacccagctgctccgcaactacatgaagcccaacgagcgcccccagaaggagcgcaactaccgcttcccccgcggtaccactgcttatttggaccagaggattatcagcaaggaagatatgaaaaaatatgttacgatcgaaacgctgtcgggtgatgataaccttgctactggggacagcatggaggttgatacttagattttcttggagatgcactgaccagtggtcttcttagattgatttaatgcacgcatgggtttcttatctcactatgttttctgtatgattgtacttcggcaaagaccgcgggcttactgttgtggggtttactacaaggtttcaagcagttacggccggacaggaaatcggagttttcagaaacttgatgtggctttcatgtaaattgtatgctcatctcagcaccctccctctaggcaaggtatgtattatattgaagcaggggtatcgtatcgctctattttagaaaattcccttgtgtagatatccattcgcacaacacatctaccaccagtcaagcctcgattcaccaatctgaggcaaagcagtgagctcttcaacaacctcagagctttcaaacttgcggacaatccaaagaatgtactcatactgagtagccgagatacggcgaccgtcacgtcggtaccggacaacaccagcatgatacatggcccgcacgaactctggatccacgggcccgccgtgtctgcgaagatatccgtaaagccagtgaaccatatggaaagactgggacggagtcaagtgtttgcagcaggagagagcaaccgccagctggtttatgaggtcgaccgctgcatggggatcagggcatcggctgtttcgcgggcctgggtgatatcgcacgaggaccttctcgtcggggtgtgggataggctgccaggccttgtggaggctgatcttaaatggggtgttgttgttgaggagtctgaggatgggccatatgctctttgagtctcctgatcgaacaacactcaagagctcttcaactgtggccgggctggtgagatccatgcagtggaacatttggtcgaatgtgctgtggaaaagaccttgtattcccttatatatggatgggtttgtccacacttctgctagagagagctggcaggtctccagttgctcaagggttttgcgggtggttttggtaatggaatttttgccctttttgttgagggctaggatcagaaggctattgtatgggagatcgaggtcatgaatttcccgcataaagtccggaaagaatattccgctggtaccttggatcaacgtttcgtatagatttagcaatgagcagattggttgatctgttgctcttgaaattttgctgtacatgggcccagtggatcgaccaagcgttcgtagaagccagagtcgcaaaattatctgacgttgggttgaatggctcagaggggcatgcttgatctgtgtttggacacacgggagagggaaatcgaaccagacctgtgactttgcaacagtcgaaatgacttcggcattcgagaggcaatcccgccatctttcaagcaattggtttctggagtccctgtctgctgaagacgatgccaatgactcggttacacgaatcacacagtccgccgcgctgttaacatcaagctggctgaagatcttgtctggaaatggcaagcttgtctccgaatcgacttccatagattccaaccaagcttgaaccaaagcagtaggccactggctgcggctctctgcatcatgggtttcgatgatgagttcctcggcaaaacgaaagctgcgagtacgcaagagcacttcaagccaagcatcaacaatgtttctgtccagatcgtggtatccgaggatgttacagcacccaatggctttccacatcgcccggtagtgcttcaacaaagctttatggtcccacgatcccagagtcttgtttcgctcgacgataatattgggtaaagcagtaataatcagacagatctcatcggttgaaatcaaccccaactctaaagcccgattgatcgcattcaaaacagcagtccgtttgccgcgtttcgtttttgttcgcacaaatatttcgacagctgcagcataatttcccgatccccgggtattcaggaacggatcatccaagaacgcaattgcttctgtaagatctgggtctgaacgagcaagtaaccgctcgaatatctgccggctgtatcgcggctcccggtggaggtcaattctcaaccgacgagtgaaatcccttacatcttcaatgccccaattcttcccatccaagaatgcctccagcatctgctcgcgtgtaacttgatctgcattggcaatgtacgacggagggccatgagtggaatggggtccaggcgctgggttctggtcggagaaagagaaaggtagttcaggaggacccaaagaatgatctgcgaggccttcaaataaagattagcggagactcaaaagactttgcgtgtcttggccacatactctgggtttcgaatggcgctctctgccacggatggtcggtccatttcatgtgctccctcccattgcggccaaacaggcacgcgatatcttcagctggtcctccccctatactcgccagagcggtgttccttcgctttgcaaggcgtctccgtgcttccaatggcccgggaacacagctcccatggcgccgttgaccgttggcgaagcgacgaaacgtggctgcgagtaggtcatcgctgatccagggatgctcaagtgttggagtagctggcggctttagagcatgccggtagacatgtctgccgaaagacatgtggttggctaggacatgtgcaggccgattgctgtcttgggcttgtcgcgagcactcgggatcaactttcgcatggcagctttcgattcttggcgtgatgactaatcacggctcgctccagtcaacgggccaatctttgggcttccattatcacctgcatgtgtatcatattttggtttgtagcatttagtttagctgttattttcttgttttttttattatgggttttatatcatcttatggcccattgatctttcgaagccagattggttagaccacctcagatgtatatcaaatgttcgcttaacttaatctgtaggtatggaaatggatttatatagaagacaaaaagagataaattgcaatcatgaaaacaacgccaatgtaatgcatgcaaaaatttgcccaccaatggtatctcggagaggaacggtgtgataaaccgtaggacagtcataacaagaaagcggagataacatgaactcatgaagcaggtataccttcattgggaaggggcttccgccctgtcaccacataaaagtccatataagcgtggacacttcggtcctgtatactcttcctcacatcaacgaggaagacttcaatttcgggtttcgaccacccaagggcaagaaagggcttatatgaccacccggacaaagcatcaagccaattgttcttactccaagcgccgattttccttagcttctcatcctccggccaggtatttgtcgggattttgaaggtctgttgttcaacgtcgacgaatcctatatccttcatccactgtgcaatccggtgggcgattcgaaattgtcttggtgggtcggaatcacggctcgatcgtatattaaggtctacccaatcatgcatggcgtatgcgctgtatcccccgtcttggttttcgggaggcatggtctcatcgtcgcattttggtttcgggtcgagctcgtgacattccatgtatgcccccggtttgaggtgtttgaatgactgtcgtagtacatgtttgaatgatggcattgccccagtcaagtggccggtatgaatgaaatcaaaataatcttggttccatatccactcttcttcggttgcatcatcaatcaggaaatggacgtttggtggaacctctgttggctgcactggggacagatccgtccctacgatttcggcgtttggaaacaaggccgctgcaagtagacaatttgagatggtgagacaaaacattggggctgggatgggtgatcatacacatctctattggccatattcctgagccagtaccaatatcaaggatcttctttgggtcttggaggggaacttggaatagcttcccgtccatcgccattttgaacatgtgatgttgcatatccaggcgatctatctcctgctcatcattgggatatatataagctaaacattgaattagccatgttgtgcgagacctgacagagccgggactaaacatacctccctcgtggtacctgtgataggttcttccattctcgacaggataatcgattacactgtcagtcaatgactgcgtatccctgttgtgatatggtcagtcacgccagccttttggtaaagcaataagagttgagaagacggaggtagtagtaccagtagtcatcatgaggtgcctacatgatttcacgttagcaagaaaatcgatagttaaaattccggagtatcaataacgatagagcattgacacgttccataagagcactaaactcaccggacgtctagcacccatggtcacctcgctctcatccagcgagatcaatagtggtaggtttgaggccgctctgggggatggacagcaggtaagctatgcctcggtgaagtggaatcaataattgatctcgcgatattccaatccacgtcccagtatgaatacgggaagactctcagactgatgcaaatccagacatgattgaaagggaaggaggggaggaaaaggagcccgacagcttgggttaagttataatctggcagggcgggaggacaatcccgacaactataacttataagatcgacatttgaaatattcgaaaagcaaaagcaaagcccggcgagtggagcagttcgtgtacaaagctgggtaaatggtaaaaagagggtaaagtatatgaaagagatgcccaagcgctttacgcgtgaaatcatccaaagcggaaattgtacccatgtaatgtccttgttttcgatggggaaaaaggtttagttttctaggggaaatgattggacgagatgaacgagagcgaaattattaatctataattattgtttttttttcccttcgtttcaatgttcttttaaattgccaatttcgcttttctcttttgcttttgttctattcagactcccagaatatatacaacctactagcccgtttattttctcctgtacagaatcataacattctatctttttccataccttcactatgttcggagtggggagagttggattgataaaaccctaggattctttttccggtgatccgccggtgatcttccggttccttgacgtggaaccctagatgatacatgttatgtgtccgtcttattcccaaggcattctacccaggacacatactatcgcgattctccagccgatggctcctaggtaagctcgatcgaccaatagaggtcggttccatctagctgggaatatgcaacccgcccagccacgggccgccttcaacctttctgctgggatttgccctttaaatctggtcgatcagcagaatgatttccaaaaaaagttgtgcagaaccctgcagggtcatcctagaatagtcatggaaggccgtaattccccgagggtatgaaatttcttcttcttcatatatcacgttttcgaatcaaaaagaaaagcgaaagcaaaagcgaaattcggcagtgataataatgggttctatactggggaactctcggccccgtagagacgtggagcaattgggattttccctctcaaaatgaattcaaatccgtaaaatcacggtgcccacgccaagacctgtgctgtttgtcatgcatgtactctgtgctcgggtttgactcgaatatcaaagtatcggaataattcccgaagattcacaaattcctgtatgtataatgctcgagtttccttggtgattcttttctccttatgcatgacgactccgactcctaccatattagctctagcggtcggaagagaggagatgatctgtcagaattagcgtggggcgttctaaagcctgggctttctcctacatgcccaaagtggctccaaaatgagagatgaggggcacatagcatcacggaagcataaaagtttccggtactctgggtcttcattttttttcgtttattctctcatgacgtctgaagttccccgcggtacaaagtgtgacctactcgtacatcgtctagacatatgaagtacccaagtccccatcccgaacttttaggcctaggaatctttcattattactctcgtgcacatgtcgatcataaaaaggcgtgattatagcgcatagtatggcttgtagacggaaataacaaatgtgaccaggtatatccccaatttcaagtatgcatatccaaaccgctccaactctgctaaatacccaaaagatccgaatctgtcaaatcatggtgataccctgattcaaagtaattgttgtctttatatattattatttgaaaaaaaaggagggggaaaaaaaacgcgttaacaatgggtcagtagcccaaccttgcagatagaatcccaagcacagcacccctgcagctgtcccaaaaataatatttcgctgccatggagccgggtttccatccgaagggaacccccgggaatttattattggaattgaaattcacccggacccggcgactgggaaagttgttcgggttccaatgcgtcggtagcgccggctccagagccaatttcccaaaatttctagtcggtaactatactctgtacatatatcttctttaatggacttttcaagcgtttttcctccgctagttgcctaagtatgtcaacgcattttttagttaaactatgtctctctcgcacaacggtagatgcacggttcagtgttcgccgaaccacaaatgaactgctaagtcgtcactccacagcggagtcacttgttagtggggacagcccttggcggtttatctcttttgagatccgtgctttagtcgttggcatttgaatacccactatatgagggacttatacggagtatgtaccatggtttccttggtgtggggagatagggcatcggaaattgcaggttcacaaccgaacaactccgaatacatacgagctgaaacacatgttatacaagatgccaacgctctgaaaatcggataatagcctatcggattcgagttcaagactagaaacaatataattgctttagtatgtaccagtacctagctggtagagttgtacaacacatgttggaaacttcagtcggctaatttgcattggactctaagaagagaaagagcaagtgacaggcattttgagaataatgtatgcagcgggaatcaccctgagctgtaccttgctcccgccctcggtagaataccaactatatacttctgatgtagttaaagcctattctatcacgagtatcttgaatcatagccttaggattttcgccaaatgtacttattactactccgtacgtgtcatgcatatagggtagaacagctgcctgctggcgaaagtatagaccgcttgggtattttcacatatatttattccccacaaataacatcacttgattttattggttgcgggtaacctgtctttccgtaagaattatcacttcacgggcgacctttttagcagctagagttgcacttaaaggcgcacgacaatgcagatacgaaactagccaaaagaaatgcaagaaaaataatcatttccttgttatatccttgaacttgataaccgacacccaataaaccacccatcaaccatcaacctgctatgcatgtaggtgcggggtgaattattcacagacatgatcggctagagatccacatagttcagttcacaccgtcggcgaagaaaatcccaacacgttgtcatctttttacagattaatgtggaacaaattttttagacccctccatcgcttagagaaagttaaatatatttggaattggaactacatgttatttgctgatatgaatatgactggccttgggtggaagtcaaacacccaatcggcacggctcagaactgaaaggtatgagcactacaactgtcagacgcaggcgagatgtagatcatgcacgtctactccgtacagttggtctagagaggaaaatcatccatcaacacccaagccgcctaccaatgagaggttagtatccgaatgttgaacctggtattgtcttgttgactttccctttacggcctggtctcattcagaagatttctctatgttgtagcctgtaggtcgtgctccagaagggtctttcttagctctaggataaacgggttatctccactgctgtggttctattggctggaacgtgtccatcttacaggaacggtgcgaatccgcgagggacaaacaaagagcggctgggatacgacgtacgtaatatagtgggttgcaatataacgtaatcggtaagcgagtggccactgtaagcgagtggccaccccacccaagaggatannnnnnnnnnnnnnnnnnnnnnnnnnnnnnnnnnnnnnnnnnnnnnnnnnnnnnnnnnnnnnnnnnnnnnnnnnnnnnnnnnnnnnnnnnnnnnnnnnnnnnnnnnnnnnnnnnnnnnnnnnnnnnnnnnnnnnnnnnnnnnnnnnnnnnnnnnnnnnnnnnnnnnnnnnnnnnnnnnnnnnnnnnnnnnnnnnnnnnnnnnnnnnnnnnnnnnnnnnnnnnnnnnnnnnnnnnnnnnnnnnnnnnnnnnnnnnnnnnnnnnnnnnnnnnnnnnnnnnnnnnnnnnnnnnnnnnnnnnnnnnnnnnnnnnnnnnnnnnnnnnnnnnnnnnnnnnnnnnnnnnnnnnnnnnnnnnnnnnnnnnnnnnnnnnnnnnnnnnnnnnnnnnnnnnnnnnnnnnnnnnnnnnnnnnnnnnnnnnnnnnnnnnnnnnnnnnnnnnnnnnnnnnnnnnnnnnnnnnnnnnnnnnnnnnnnnnnnnnnnnnnnnnnnnnnnnnnnnnnnnnnnnnnnnnnnnnnnnnnnnnnnnnnnnnnnnnnnnnnnnnnnnnnnnnnnnnnnnnnnnnnnnnnnnnnnnnnnnnnnnnnnnnnnnnnnnnnnnnnnnnnnnnnnnnnnnnnnnnnnnnnnnnnnnnnnnnnnnnnnnnnnnnnnnnnnnnnnnnnnnnnnnnnnnnnnnnnnnnnnnnnnnnnnnnnnnnnnnnnnnnnnnnnnnnnnnnnnnnnnnnnnnnnnnnnnnnnnnnnnnnnnnnnngccaactcagtaatcaattgagaagcttcctgaacagagaggccttcatcggcaggtatctgcctccgggatctagtactttttgcttttgcttctcgttggcagcgcgtaattcgcttacttctttctcaagaaaagcggcagattgcatggtaatctggcaggcttttaaaacctggttaattgccgaactaagcgggctcggagggcttcttgatctcatccgaagcaatgctttaatagacgaagcttgcttttgtaattgaatgtagtttgatggcgtttttgggtcccaatcgctatcccggcttaggggggggggtaggtgttcgaagacaaatattcagctttgaaagtacccgatcgggtgaaaaaggtattaaaccggctgctgagaagctatttttaatcgtctccgatttaaaagcttcaattcgtacagaggggtatgcttcgaggaatttaagtttatcaatatagttgatcccggtccgcattttcatctcaaccaaccggccgtacaaccgttttaccaccgcaaaacaaccgatatcgagaggttgtaaaaggtaagaggaatgcggtggcatacaaattggtataatatcgttttccttacaaatttgatcgaattgaggggttaaatggcttccgtggccatcgagtaccaaaagtcgataccttcctactatacgcaataaagttaatggtataaagagtttctgaagccagcgaagtccaatttcatctgatgtctacccatttggactaacttcaaagcgccagttactaggaaggccttcgaaccatgattcaaggaagaccttgcctttaaaaataatacacggagggaggacccatcccgccgcgtttatacattcaattgcagttacccactcgcgatttctaggttataaaagtgatctccgaccgtagtattcacttcttattatannnnnnnnnnnnnnnnnnnnnnnnnnnnnnnnnnnnnnnnnnnnnnnnnnnnnnnnnnnnnnnnnnnnnnnnnnnnnnnnnnnnnnnnnnnnnnnnnnnnnnnnnnnnnnnnnnnnnnnnnnnnnnnnnnnnnnnnnnnnnnnnnnnnnnnnnnnnnnnnnnnnnnnnnnnnnnnnnnnnnnnnnnnnnnnnnnnnnnnnnnnnnnnnnnnnnnnnnnnnnnnnnnnnnnnnnnnnnnnnnnnnnnnnnnnnnnnnnnnnnnnnnnnnnnnnnnnnnnnnnnnnnnnnnnnnnnnnnnnnnnnnnnnnnnnnctcgtttacagtggccactcgcttaccgattacgttatatcatgaagatcatctacggagtatacaacatatacaatcaatatgtccatttcacctgcttggctctttttggaagacagcatatcatcagaaaactagcatagtcttgttgtcattctattatatcttctacgctagtttggtcgattaggcttcactgtccaactacagaaatatcttccctatatcttaagcacaatactgtcttctgtgggtacgtggctatatttggcccattagctatggcgcttcttttgttttgttttgcctataaaagtcatgtctatcggagttgcggtcaacacgaacaacggggaagatcctcaagtggatatatatagcgttcattccgtcattcactacagaatctaagtgagacttccatagattacgcatgcttagcccagcatctggaagcccagtatctggaacaataaggatatcagcaaataaactttaaactagttatggcaggacgcaaacagcatacttcccaattaggttatattgatatcggcaaggataaactaaataccgacatgacgcatcttgtgatctggagaccccaaatgcagtgcaccaacaacaagcaccaacaacaacatatttctattctgcaaatatcatttcgaagcattagcggtaattttgaattttctcttccttgatcctttgtcccattgactttctgaggaggacggggtacagaaacatcaatttgagtgctgacgcgcgacgcgcgacgcgtaaggcatcggattttaccttctaacaattctgtttgcaatggtacgccaaataccagctcgttcctcaaggagccgggtgacgcccgcccgtcaaccgaagcgtcagagacaggcagacgatcatgctccagatatctatcaagaactgttggaggaggccgaagatagaaatcctggtcaatatgattcggacagaccaatcaaaaggcacaaggccggagataggaaagctatccctgtgggattaggggcttcggaacaaacacaccagggctcagaaaaaaaccaacatagcacccaactagtgcaaactgcttacgattcatcgacatcagaagaatcagacgttgattgggaagacgttgaattacagcaaccgcctcagactttgtggaatgaaaattttgtgcctcaaggcgacgacgaggtgctccagatcaccctagagcaggagcccgagaagcacaaaaaaatgatccaaagaaggaagcccttaactggagccgagagaaaaaccagattggatgtgcacaaatctcatatcctttgccttcttggtcacgtccagttgcgcaacatgtggtgcaacgatgaggaattacaggtgagcgttggctcacatgggatatcgattgggggactaacagcatcataggaattcctaaggaagacactgcctaagaaagtagtggcgcttctgcatccaaatgagaataaaccacattacaacagatctaccacgtttatggacggcctcaaccaggctgcagatgccttcacacgcagatttaaggttactaaaccaggaatgaaacgggcccactgggcggaagatgaatatcaattgaagcagaaattggtatcctctacaagtttttccatcaacaattttccactgacacgaatatgtaggagtcaatcatgtcgaatgctgaagtgtttctatccaaaggagattttcgaacccaagcgaagacaatggaaggctcccgagactttggggctcagctattctgtgccctattgcggtctgtagccgtagaggcgagacttgtttgctcattgcaaccgttgccattttctggcactttgaaagacatgacgccgtctaaaccaaagcatccatatattgtgatatcctcagacgatcatggctcctcagcagatgaacgaaataaggatgaaaaaccacctgcagcttcgaggcctcgacggattggacagcctagattcacaccctcgcgccccccccaaccaaaattccattcaggcatgtcaattccagcgattcctagtctacgtccaactaacacgcataggtccgattgcaacatcgcgagactcgccatttccggtattttgggtggaagctttcaacgaagctgcgcagaaatgggtttcaattgaccccatcgtaacaaaatcccttgctaaaccttcgaagtttgaaccacctgcgagtgattcattgaatttgatgaattatgtggttggtttcgaggacgacgcttccgcaagagatgtcactcgtcgctatgtaaaagcatttaatgcaaagacgcggaaactgcgcgtggaatcgacacggagcggcgaggagtggtggaataaagcgctaaaggcttatgaaaagcccttcttcgaggatcgggatgcggcagagattagtgaactaacatccaaatcagcagctgagcccatgccacgcaatatccaggacttcaaggaccaccctatctatgcgctcgagcgacacgttcgtcgcaatgaagtgatccatcccaaacgcatcattgggcacgtggggttgggaaaaagcgtatcgcggagtgagacatcagaacccgtttatcgtcgagctgacctgcatattgtgcgaagctccgataaatggtatcgccttgggcgggacgttagagttggcgagcagcctctcaagcgtgttgctgtaagtcgaaataaagccgggagcttgagtgacgatgaagatgaaaacgagtctcaagagactacactatacgccgagttccagacggaaatctacgttccaccaccagtagtccaggggagaatcccgaagaacgcatatgggaacctcgatgtctatgtgcctagtatggttccgtctggcggagttcacatcaagcggcgggaggcagttcgagctgctcgaattcttggcattgactatgccgacgcagtcactggatttgactttagaggccgtcgaggcacggctgtattcgggggaattgttattgccgtcgaataccaagaagcgcttgaggaagttttgaggggtctggaagatgagaggcggcatgctgcactggaggcaagaactgcggaggctctgcgattctggcggctctttttggtgaaacttaggatcgcagaaagagtcaaggaatatgctagcgataacgaagaacaacagctcgaaggtatcgaagacgaaatggatgttgaagatgctggtggtggtttctttcctgaaccagaccaaccagccaatagcccgtctttgaaagtcctgggaaagggcaaaatggtacacgaccagaattttcccgaagaatacacggaaccagagatggaaccgtcattgcacgaggaggattatattcttggaggcgggtttctgcccgatgatcatgacccagctccgaacccagtggaaccccccaagcctgcgcctttggccgtaaacccgacatcgattcctgagattattgccaggaaaaaagcattgaagacccctcgctactcactggtggttgtcccaaaccacggcttaaactcgacatccgtatccggagtcctcgcaggatcatctgacaatgttcctatcgcagtggattcatccacaaatggtggctccaaatccgcaagtgtggtcactatctcccggccaccgtcaccagtgcccaattatgattctgatagcgagatcgagaagggttccttgctttctgaggaccctgaagatgaggatgcaattcccgaatggctgatgtctgatgaggactagtttttgatagttagacctgctgtatgctatctatgtacgctgaaaatcaaatattcaaatgaaatattcaaataaaaccaaatcttcagagctgctgtactgcttttggtaacgccttcactaccatttgtgttttgtatagatcacatctcaatcacggttatgtatcattatagcgcaatccaatacaacagcccggccgggctagctcaatcggtagagcgtaagactcttaatcttaaggctgcgggttcgacccccgcgttcggctattcctaaaaccaaacctgagatttctttttttgcttgttgttttgcttttttcatcttccaatttgaggattagacagtccagatttgggataattgcattgttcttttagtacgtgtcctaaactccattgtaaatgcaagggggtggggtctactccgtataatgcacgaaccaagtcgatattagcgacgcgtcgacgcgaaccgccttaggcatctctctcatcttttaccgttaggcccccagtccaatgtttagccttgaaccattgctgttgcgatgaaagaaccaccgcctgaatctagaaacctgccagagactcctcgaaatcagtttcgcactccgagaagccatagtccacaaggtcttccaaccactgccacgaaaaccaagactgcacggaaccgaccaccacagtcatcgacatcggcaagcattcgtaagcgaacatcgctgccacgagttcagtctactctcacgcaaattgactttgtgacacagtccacaccttccaatgatgaccagcttagctacatcgacgaacacaaacgtcgtgacgatacccacgacaaaactgagcggccaaatgtagatgatgagtccgacaaggaatcagactatcttcctgctccaccacttcggtcggcccgtatctcgaaattcagaatgagcgaacgagagcacgattcggatgaacgcccgcagaagcggaggagctctggattcgctagtcgagatacacaccgaagcgatggaccacgaaagagcgaggccccaagggcgagtattcgtcctaggggcggtcgaaaatcactggagaagtcagcagggaagcgggataagaccttaactcagatggactttgtacgacgttacattaccatcaacgatgatgatgacgatgtgaacatgggatatattcagccgacaccgcagaaaaagggcatgaaagatgaaccagccgagcacacgccgaaattgaatcaaccacaaactacgaagcgtccgacctccaccaaacgaaatcgcagagctttggaagaagagctggatctctcgacgggcgaacctatatcccagcaaaacgaagcactgcagtcaaatcctggaagcgaaggtgagggcgagcgggtatctgcagctcccgtgacaccgcggaagcttcgcgcgcgcgagataccttcttcacagacgcctgaaagccctggactcgctattataacctcatctcaatttcgcagcgctactcgctctccttcaaaacgtaacccgccgagccccacggacaattctacgtatcctgtcaaagaagaaactacggaggctcggcgagtggtcggggatttacaagaccttggaggtgaatctttaccacaaccaacaacattcgattctccagggatctataaccatttgattcaccccgatctgacaactaccgaggaatttccttcatctgcacctccaacggagtcgacttcccaggaatttcccaccgaagaaatcggggactcgagaaatgaacccaccaaaagagagaggacagtcatctatgaaacggacgcggactcagaatacggagactctgaggacaaccttaatggatgttccatgacaccatcttcaaagaaagcaaaccgaccaattggtccacaagacggcgtacaggggactgaacacagcgcggagttatccaaggatgattctcaagaacttcctctaccagttgtgcaatcgagccctggacccaatgatcctccatccgaaggtccaatgtctgatgcctcaatttgttatcgaagaatgcacgcagctacacaattcccgcacgagccaatcccaatgctgaatacacagaagatggctgagctgttccctcacggagacaatacccagtacacaaacttggaggcatggaggccttctcttcgcaaacaggcgacggggccactctcgcagacacagagccaggaaggcgacaaagagtctactgaaatggtccccgagtcatcgcctatccgagaacaagaacgtggaatcgattcaggtgataattcgttccaacgacctcgtgttcctggctcagtggtccaagtcgagtcctcacaggcggtggaccgagatcctcaatggcagggccgagtcctctcacggagccagctgctcacatcaagcgtcatggagagcattccactcccgaacttttggatggggagtcaggatagtgtaggggagccttatagcttacctgaaggatgacattgtttccgagaccattattcaatggattatgatttatgaagacttagaatattattcaatatgatcactctaatctttaccctgaagccgctgcccagtgtgtttatacgctgtgcggtgtgcggtgtacgatgtagttttggggatcgtcgcaagcggggcggtcgggtgatggacgaacgcggagacacagcaaccttgtggttccaaagtctttgactctcttttccctcttgcaacttcctaatcatggatatcgcctacgatcacatccaggaagaggcattttcgaacgaagagggagccccctcggagtctaagcctcaggagtccaacgctaatctcaacgatgagctacaagagacattccgcgccttctccgccagtccatggggctcccgaattggaggattatggaacaatgtacgcaaacagggagaaacatactacgagggtgctcgccaggagtacgcagctgccagcgaggaagccgtgaaaggattttcagatctcagggaaacactcgccgaccggacaagggggctgtctctcagcacagctgctttgacgggcagtggcgagggacaaagcgacgagatcaccacccccacagctgctgcaggggaagtagaatctggcgacaagagagaaggcgaaggcgaaggcgctggcgccagtggagaaagctttattactcggttgaaggcggaagccgctcggcgactgaaggagattgagaaggcagaggaagcagccgatgaagcgattctgcgattcggaatgaatatcggccagaagctgcgtgaggctgttagcattgtgccgcccgataccgatgagtccggcaagcttcttttcgagagcaaggatgctgagggaaagcgggtcattcatgctacacggttcgaggcacagctgcacgttatccattcaaacctggaaagcttcagcaaggacccggtcagtgacgagtggccttcgttcaagaaggagttcaatgtcgaaatcaagacggatgagatcgccgccgatctagagaaatacccagagctccgttcggctatggagaagctagtgccggagcaggtggaatatgtggacttctggactcgttactacttcttgcgtctcgtcgtggagaccgaggagaagaagcgcaaggagcttttgaagggtatattgagtccatcattacggtgattgttgttttccagttttaataacttctactttacaggtgccaatgccgaagacgaagaagaggtcggctgggacgacgactctgactctgagtctcagtctccttctactccacatgtccgctccggtgcccagactctcgcccccaccaaagaaacccagaaagccgagcctcgccggtcaaacgaccagcaatctcaagccgacagcgaatccagctacgatgttgtgagtggtgctgccagccgtacacccggtagtcctaaggaaaagagtccctccgctgcgaaggcggatgagagcgacgaagattgggagtaactccctttttcttttcaaggaccatcagcaagatgatccaagttggttccgagggcacctgtttataccatataccccctgagagcgtggtcttgctactgcgtgcgccagcttaaacacggctccctaagtatctgctttggttggagtttaggaatgtcgggtcttttaattttggcgtttcgggcttttcccctccttttattcccagctttgttttctgcaacttgctttcagcgagcgatgttatctgtctatgcggttgatatctgaatacacgtcattccttctatttgaacagtatctcaccccgggatctgactatctatagcccctaggtagatatcaactgacatccaacagccgctatggatgatggcattcgccaaaacaatttccagcagaggattcgttcgcaaggtaggaggaaaatgcaccccctatctcataatcatgatcataatacatgtatgtctaaggcaccatagtccacaaatttcccattcatttcctattcaatctgtcgcgccaggccctagatctctagcattcagaggcctacccatctttttcgaaagaggcgactcagcatacgcaggcctcataccacgctgactactgggacggacattcggtgagcttttgcgcaccggggtttccggtgtgctttccctggagcgtatgtggaagccctgcgattgcctagtaggcgagtaaggatcgccgccatattggtgggggccactatcgggctcccagccgtactggtaatcctcgccgcggtgtttgacggggctttcattgtaggggtcccagccgacgcgacgacgggcctccgagcgcagccgctggcggtgctgttcgtcaccaccagcgccggtagtggatgattcttccaggaagaagttgaggagctcgtcgctgatggataggtgggattgttgctggaattgctggagggatgttaggcgaaggagggtttcgaggagggagagggaggtgcggatgttctcgaagtgagggttggagactgttgttgtggcaggggcggatgagaatgagtgatttaggggagatgcggagtgggatgaatgccccttctcatcaagcgacagcttggccatcatatttgggtcgattgagggtccgtctgcggatggttctagcttttcagcttcggactcggtatcggaggtttcatcttcgttgtagacttcaaatgcgatccattctgggtccagtccaggaggcagacgccattcttcggggatggagtcttcatgcagataatcgaagctgctgatttccggactgtcctctccgttcagctgtgcatcgagttgagcttgttcctcgtccgctggtccctccgattctgcctgaggaaagtcctcctccacctcgtcacgttccatcatgcgccgtggcgggagagcatttaggtcccgtttcaatagcaacaccggattattcgtttcaccctctgtgctgatattgaggatcctcccggtatctgcgtagaatatctttgaaatttgatgaataggaagaatctcccggattcctgccgtggacacgccttcatagttttcgggttgcggatcattctcatcgattgtgtggactcggccatcatctaggtcttcgatgatcaggacttgataagtgtattcatcggccccggctagtcctggaagctttgtccgtgggcgttggcctggagcttgcaatgcagctattggaacgcgacgcagcttcaaacgtgccttgtgcatgacttccttccacgtggcctcgcgtacagattcttcgtcctgaggtcgcaagtggctggcaaatagcatatacatcgataaggtaaaagttggccctacttggactgcctgagatggggacattgaatattgtgtatcccctgctgtgagaaacgtgcttgcttggagaagtcgggatggcgataccgttgcgggcaagttagtggataacttggccccagaggtggtgatcgccagattcatcagtggcactgcgtcttcaatccgagccaacagattcttgatatctttgataataagcttgatttctttctcgctgttcgtctgatctttggacgatcttgctcctttgcgtctcatttcttcagatgccgcagctcttcccagccgctgtccgaggacttgaatgtcccatctcagagactttgtgagggcgacagcagattccaatgaagtatttcctcgagcagcactagacaaattgtgagctttctgacaattcaacccagtgtcgggtgactcacatcaactcaatcatgtcaatagctggggcgataacttgtatcttgctttccaggcgttgttgcaatgatattagctcctctctgtcctcgctcttgacattctggccaagaaaagagaattgatcagcgcctggattctttctacactcaagaagaacgcttaccttgagcaagcgcgacgactgacgcattgcatagctagcagttatcgcaattcccgacctgtgaaggctcttagcattggatggtgtagttcttccgtcattatcaagcataccgaatagcataattcattgcctgccgggtgagctatatgaattgcacgaattagcttctcgctccatcgccagtgacatacgaaacaaaccccagttaaaaaagtgtccattttggttcaagctggaggccaacggcctttgaactttgcagtgtagatcgtattgacaggcatataaaacacccctgagcaacctatgaattaaaccaggtgcttatcgataagagaatgagagctcaaagggaatgagactttccgacaatttgtagttttgaccttgaaagtagacaatggagtgaagtcaaacagttgaaaaggccataagcataagcaaacatgatggtttcgaacaaacaattattcaccttctcacatttaacagaggaaacccattccatataatatcacgtgaaaaagatatcgcggggtcttagtcattcacccgtgcaaaatcaaaaggcactaagacccctcttattgacccaacctgtatttgtccaaatccgtcttggtttggtattttcgtgttaatacgactttagttcttatttcacgatgtcaaaccaaacacctgaatcctgggaggatgagctttcccgacaggctgagggcgttaacctgaacgcacaatctcgccctcaggcccaagcaccctcattccaacccggcgccgcctctttcacgcctggagcctcttccttcgtccccggacagcagtaccaacagtattctggttatccccagcagggatacccccagtatggtcaacaacaggcctatggtggctaccagcagcagcagcaagcctatggccaatacaacgcctatgcccagcagcccggtggcttcagccagtacaacaatggacagcaacagcagcaatacggtggctacaaccagcagcctcgccagaatgcgcctgtagcggcacaacagcaaccccaggctgcagcacccgcccagtccgctcccaagcccgcatcagctgcccttcccaagaccaaggttctgtctatcggcgccacctcctccagcgctgcccccaagaccaaggtcctttcgatcagcactcctaccccgacagccaagcctgctgacaccacccccaaggaggccaatggtgatactaagggccccgcagctgctgaggcaggctcaaaggtggcggccaccaaaagccttgacaagacagacaaggccgctgccactggcacttctactcctacgccatcttccggccgctctagccctggacgttccagcccagcacgcggcgaggcagccaagcaagctcgcgaggtcaacgccgtcgcgaagtcacagcaaactgatgtcgatgaagcaaccctaaaggaaatttacggtgagcggagagagcacgttaacgtcgtcttcatcggtcacgtcgacgctggcaagtctacccttggaggttccctcctgcatgccaccggcatggttgatgagcgtacactggacaaatacaagaaggaggccaaggaagccggtcgagagacctggtacctttcgtgggctcttgatctgacccaagaagaacgttccaagggtaagacagtcgaggttggccgtgccttcttcaaggtcaccatcccgcacccggagggcgacatcgagcgtcaattctccatcttggatgcccctggtcacaagtcctatgttcctcatatgattggtggtgcatctcaagccgatcttggttgcttggttatctctgctcgtaagggtgagtacgagactggattcgagaaaggtggccagacccgcgagcacgcacttcttgcgcgcaacactggagttagcaagttggtgattgctgttaacaaaatggacgaccccaccgtcgaatggagcaaggcccggttcgatgaatgcaccatcaaggttatcaagttcctggaagccctgggctacaagaagtcggacatcttctgcatgcctatctctgctcagcgcactatcggtatcaaagacagaattcccaaagatgtgtgcgattggtacgacggtccatcgctgctcgaattcctgactgcgttcgagctccctgagcgtaaggtcaacgcgccgttcatgatgccgatcagcgccaagtaccgtgacatgggtactatggcagagggtcgcattgagtccggtatcattaagaagagtggtacttatctcatgatgcctaaccgtgaggaggttcaaatctctgctatgtacggtgaaacagaagaagagattccgaccgctaaagttggtgaccagattcgcctgcgtctccgtggtatcgaagaagaagatttcttccctggtttcgtgctctgctcacctaagcgccccgttcactgcgtatctgctttcgaggctaagattcgtatcttggatctgaagagcattctgacagccggtttcaactgcgtcctgcacgtccactccgctgtcgaggaggttactttcgccgctctccttcacaagctcgagcccggcaccggccgcaagagcaagcgtcctcctcagtttgccagcaggggccagaccattattgcccgtctggaggttactagcagcgccggtgcggtttgtgtcgagacgtacgaagaatacaaccaattaggtcgtttcactctgcgtgatcaggtatgtcttctccacacttttttcttaatattgtttcctaacgtatcgtttctagggtcaaaccattgctattggtatgattaccaagctcatcactcccgagaccgaggcccagtaaagtgattttgccactgagggtgcctgaatgtctatattctcaaaagtgcaacgaatcacaaaataaaagcaatgtgcttgtgagaaaatccgaacagggaggtacgggtgggcagaggtcgcgtaatgataccacagacagtccacaactgatgatgatgaacatttcttttttctacatcctttccgcatatagactttgctccatctaatgaatccaagcggttgaaccgtatatgggttcttgggttatccccagtgatattgggagtagcttatgcgagccagatctgatgaacgatcaatcatggtaataaatgcaaatatgtaaacagaaaggatatctatccgacgggtttcctgtcgttaccaaggcaaatcggaaataaaacaaaacgtattcaacaaaagccccagtctacctcctctttccaacaaccttcgtaaacccatcatcgtcaatctcaggctcagcccgctcccttggagcccgcaccaactcaggcgcctcacccatctcagtatcttcttcctcactctcatcgtccgtctcctgatcctcatctgcagtctcaaccctctggaactgactcgcagcagagcgattttggctcttcttgtggaacttctccaacatctgctggatagtgccgaactcgcctcgatccgtctgcgtctttagctccatgatcatgtccgcgacgtccgcagcgctctcgtcgtccaccgccacgtcaaactcgtcgttcatcacttggacgagcacttcctccaggtccacggcgtcggtctcgggtcgatcggccagcatctcggagatagcgccgcaaagccagtcccgcttctcgtttgagttggcaccgccccagtttgactgcacggctagtgaaagggccggccaattgtggagtgtgagagtgatcgcaaggtcgaggtaagaggcagcatctgtggccggttggacggttgaaattgtcgccattttggagggttaagtttatatggttgttggacctaaggtgcgtttgcgattcttttttttttttttgggcacgactgatagcaccccgcggtctcggtggagaaaaagactgacttgctgatggaatgggcaacttaggtttgtgataatgatggaaacagtctctttgtcttcttgggtctcttcgcaatcggtcgcactgtagcgcaattgagttctcttaatactgttatgtatatggaagtttttttttttaaaaaaaaaagaaataatccgattagatattatatagtcatgtgacccgaactcttggcaatattgcctccaaggtttttcgagcttccttccaataacatatgttggagaatattgtgcgattgagttgaaataataaaaaaaggaaaatctccgatagggggaatcgaacccccggctgccgtgtgagagacggcgatgttagccactacaccatatcggatggggactgcgaattactctcttaagtttatttgtgacctcttgggtttagcgctctctgtccgtgtgtgtttccgtgtgtggttcaagtcccttgctcttccccttccatccaacaaccccgattttctttttcgccttcctttctcctacgcctcgcaggtgaggcatttttgccgttggcctggaatcaccgagctcctgagcaccgctatccccttctcccaataggacgtaaaaatgggatagacccacgtcaagatgagattcggggagatatggagtgaaagtctatacattcaagacctgctgccaagtattcaacagaggtgaatttccccatttcgcatcaaatcatacggattctacatattatgagtgaatcaagatgccgaatatatctggtggtgcccactgggttggtggtccgcatatcaatcgatcatttcctaatgcagattagactcggatattagccaatggcaggctacaatgcagccgagagcctctactccgtacgtcgtacttcttgctgggggccgcccccgatgttttggcaccaaaatgtaagagtaaagaaaaaaaggcccgtgtgttcctttagtcgatggtggcgtggtccctggtggtgccgatcaaccgcccctaccctgctaaagtgggtatgcttccaggtcgaaatcttaaaagagttggggccagttgtgaggtatgaaatagaccagactaattccgcttcaatgtataatgtacaatttatcctaacagggccatagcgaggtgtggcaacgcttagttcaaatgtgtctataaatgccactatatgtcaagttcgaatgatgcgaggatagaagaacatagtgtctagtcctgaggggagaaatgtaataaggccaatcacactttcgaccatgcttttcaaaaaagaatggtaggcggtgagtctcaagataaacctgaagtacatcctaggaagagctagtcctaattaggcagtacaactattaaatcaggcatgcgacgttctgcaccttcgtagccattggtccgtgtgcgtgcccgtgcgtggttgtatataatccctccctcgagtgcaatctacgctgctttcgctcgcccagccccgttttacctcagctttcaccatcaacgtcagatgagacatttttgccccttggcttactacgccgaatactgatctgtcgcctctcttatcaatcggtcggtcaattgccgaacttccgcgaaaggttggacgtttgcaatggttgtagaaccgagcagctatatagacaggttacctttcacttttacacctgcttcttctttctcccttcgtcttaggcatcataaatagtatgcacattttaattattatatagatctggcacatcacaggcattactctagaggtcactttcgaaaacgctgtctcggaaagcctaggttacatgtactcttcaatggtctatctaattcatcccttaattcaaagccccgacagctgaagcgctaaatttagtaactttctagtaattcggacgagtttccaaaggaattgattaataaacgcattcacagacagaacagtaagacagaccaaggagaatagactaagaacaaattgagaaaacaaaaaaagatatatctctatgataagcaatgcatatacatacacagagaaaatcttcaaaggcacatcgttacgacttcttggatttagtcaaatagattaagcgaccaccattggcatcttcgattggcagccgggtcacaagaaattgtgacattatcgtcggacagacgcacagtcttggcttaggaagcgaacgtaggtatcgagctcagactagcgacgtagctgtttgggataccgtcttttacaaaagagaggatgtagtcctgtatgataaatgcaatagtctggttcacagcaccagtgtcaactagactataagataaagtcttctgatttggagtatagaaggtgtattagatatcctgtacatggattcccggccatacgtcgaaaaaatgggtaaaggaaccgttattaaaggcgaaattcaacactgccgcattacagtccatgaagatatcgcccaccgtcaatgccgctctctggtagtcattggtataccccttagacccatcaaacacaggcggatagagggacttagtaatatgatcgatagtagagctgttagtataagtgagaatatatttgacgagcgtctcatattcctcatttgtatacaccgttagcaccaaaaccagaccctcatctaagctataggaaatcaaagcctttacagattggtcgtactttccacaacggatcagctccttagggtctgccttcacaagactgccatccggtgtagggccatacatagccgaagtgtacggctgtgagacaccgatttagtttacattcgccgaaactaaaacatcagaaagaagctctcgagcttcagtcagcaacttgacgttcgcctagccgaggtaatcttagaaagtcctttcttggttttcgagcgacctatataggaaataggcataagactgtggcatagcccggttaaagagggctggtgctacccctccgtgtacagtgatatgatacataatagaaccaccgcctgcagattccccaaagacagtgacttatttcttatctcccccaaagcgatagatattgttctagatccactgcaaggcaagtcgctgatcgtaaagtccggcgttgagtacaccaccttccacttcgaatgagggcccagataagaagccaaatgcacctagctggtagttaagagcaacatataccacgccctctaagccaccggcttagctgcgatcaatcaagcccttaggtgatccaaaagacgtcatagacccggcagtaaagcctccgccttagtcaattagcatttctcattaatgaagaatagtaggtgattaccatgaatccaaacaagaacaggtaacaatcttctattcttctggcagttattaaatattttgcgaggcacttggacatccgaaaacagacagtcctcctctccaccggcggagatcgcggacaagtcgctgtaagagacattagggaaattcccagtcttcaaatactcgtttatgtattgtgaggtacgtaactgccaactgcttattccatagggacaggaaatcgactctgggttggactggatgaccgatcggttggttaggggtaacataggagctttccagcgaaggttaccaaccgggggagcggcatatcggatgttagagaagctgtaatgactatcggaatgcttgacttatcattagattttgttgaagcaagcagtttgaaatcgcagcatggtaggatcttatattattcgctccggtcgcctggtagatctcatagcctagatccactataggctgttcctttttggcgcagtcagcgtgaactgcaactagcatacaacccaactataaagtttgtttaactccaaccattgttggtcgcaattacataggttctttagggaaggctctgacccccccggccggtgtatttatatttggactagctggagaatgatggcaagagctaagccgaaaattccctatgtggaactcatgacgaatttatctcgtttaacggtacgaaaaggggcaatttataattgtcagaggccaattcttgaccatgaaggccgaacatgaatacgtgtgtacaagaggatctgcacgaaatcatgcttggcccacttgacccgagaacgaatacacgtatagagatttgccccttaactttcattacatccgccagtggcatacagaattaaaaagcacgtctccagcatttttccaagtaggtaactgtagcagaaagtacctgagtagcagaaacataattcacggactttataccattgctcccatctcgttcaaattgacccttccaggaacatgcgaacatgcgtatacctcgctgggaaacctgactccaaatgtcaccatcactatccacatgagagtcgcgtcgaatacatatgccggccactcattttgtagcaggtatccatcattacccataatgtactctgcaactctgaatatagaccggaccatgatcaacagactgactaggtacagggtattgaggtgccacttccatcgtaaatcttcagaaaagacctcgtgcgttgggtgtctatgaattcggacctgaaacatcaccatgctaacaatgaagaatccgaggaaagcgacctggacaatcagaccaagaatgacaagcttatttccgatgctagcaaggtcactggagatcatcatgccagcggcaccgccctggattaaaaaagacaagacatcgccggtgacaaagagcttggtcaaccagcgaacgggtataagtgaatgtctttcacccttgactgcagtaataattcggcccaaaaccatgtaaatcgaggcagcgaagagggcagggccgagtagtatgaagacattctggatgcaaaagggcatcattcgcccagtcttgtcataagctgacgttcgagcacagtaacctatgaactcaactggtattattagcatgtctcagtctctatgagctaatagtaaatgtccaagtgtacctacagaagcccccaatggcaaagcaaatgcagaaataggtcttcagtttccatattttccaggtgtgatatgcagtcgccgctaggaagagcaagagaaaaataaccgctgctgccctcgaggggacgtaatgccaaagataataacccttgtacgtttgaagttcgggcattgtgtgtgtcaggagcgcgggttggtactgagtgaggaattgcgagctggcgtctttggttgaatgataatataagattgtgattagggttgaaatgttgggaattgaatacttatactctaaggtatgagctcagcagataatatactcgggcaaggatgcgaaaaatgacaaatatccactacagggcattgtctatcgtaactattattagacctgcatcccatgaggagattcctacatactgtctctatatacgcgtatccggtaccagatagagagcaatcttctatggtcattaactaatatacggatacggagtgcagctaacgtacccttactgaagaaagttcgacaacataattgagggacgcgatgttttcctattattgcatattatagtagtaataaagatacctgaagtccgacgtggattggcttataccgtaggttctagtattaaagattctaaactgaaccggaatccttaatcgaggggaagccgtctctagaacctgtggcaacgcgagttgataatggtggctcgtgcatacgcgagtaaaagctttccttgaagatatattccacatatgctccacccattctagtgtgggtcatacatattgccacaacaagctagaactgagagagaaattcgcgtatgcacgggccatcatacgctgccatcatttcagagcccaatcttaataatactctggagtatattcccaatctcaacaaccaaccaattccgtctcgcttttgttgaattcgtgccatcgattctttccgaaatttaaaataccctaggcccctattataagagttaacgatagagacattaggttgttgattcagctaagacttgattcggccagtgcagccattctgcccactccggcccaagataccggtcgatagactggattaagaaactgccaccgtcaccaaaaacccacagatcacgacaggagtgcagaagagctgcataatgcgctagaataacgagtgcttccggcctacggtgcactagcatttcggtatattccaaagaaacaatgattggccaagcgatgacagcattaatattatcgacggccctatcagattgtgcggcattgagtgatgattgtaaagcctcaatcgcttgctcataggtttcactgattgaagggcctagcctggcggctttgataagttcaagaaggcagctgcacgcctgtccgtccctcgtagaattccgcaggcttgcctcagcttcgttcagaatcggcttgagtgccgtctctttgatctgattccaatcttctccaatgactgcgcgtactccgcggtggatacggagatagtggacgaaccgatctagaagcgcttgaaaatcatggtctcgatataccagggtgtcgcatagaatatgaatacccagcatagatgagaatatgaatgcaggtaccgttggcctcatgccgagttccgagtcggtctcatggaacatccgaagtgcatgattctgtaactgcgccgagtggtgtctatacaattcttcctgaggctcgcgaatgatactaaggtgtaaagcagcgagggcaagtagctcattcatcaggtagggagcagatagggcgtggcctatcacttctttatgtaaaaggattaggttgttttcacccttgctcagggaaggcagcgtttctgtagacagatggtagagcagctcagcatgaagcatattgacaggcggatctggctggatagaagaagtagaatctggtggcagcttggtactgggcgattcggctgatactgatggggagattgtcctctttctgctcctcccactggcctgcatgactttgatcgtcatttcgggatattcacataaccgttctgaagatatgcagtttgagcagattggccctttttcatcgcactgtatacagttaggatcttgtctcaacaacaatagaagttctttaccttgatgtggcggcgcttacattcgacgcagccattccgcgacttcttatgcgtcctccgcggcatctgtgcagtggtggtttatcgctaaggaacatagagtatgcctgagagcgggggctatgtatagttgctggctccaataggaagcccactccttaaaaatcggttaagaagctcaaaagaaataagtagaattcaaggaacacaaaatcctgcctcgtagtattgttactgtattatcgtaacttatcacatgatccaccgcaatcggtttaaattcggattttgcccttctgactaatatcctggcaccaacgattagtaagcaagaatgcacgaacaaaagtcacatgagcggtctgtaaaaagacatataattaaagcagtggtatcaaatcttagtccttgacatacacgtatagacgatttgagacccactcactaaggacagcagagttctgcggtttcactgtggatcaccagaccttagtacaatgcctagcgcgagaatctttttttggtcagaacacagggctgtgtgggttggtcctagcgggtttccgtgcatacgcgtatacaagatcacagtcaaacgggattgttgtcactatgggaatgtatgcgcccggaaggcaggcaacttaatttcaagtcatggtatatatatgaattgacattgtcagcccgtcgcgaaaacctcaactcatgttaaattatcgatatgaatatgaagatggcggtcttctcccgcaccttgctctccctgagcgctatttttgttgagatagcgtccgcttccagatgttcgccaagcttgatcgagaagccaaaattgtctggtacttcaatcctcgatgttcaagcccaggaagccctcaacttttctgccgttagccttggaccagggactaacgaaggcggccgatatacaatcagcttctgcaatgttaccgttacccacacacatcctggctggaatgacacaattactactcaagtatggctcccacttgagggatggaatggaaggtttcaaggcttaggtggcggaggctacgctacaggctttggcgaaacttacctaacatacgctgtgtcgcgaggattcgcatctgcctctacgaatggaggcctacctgtggcgaatgggaaagatactatacctacagacctgtcatgggctctgaacagcgaaaacaatgtgaactggttcttcctagaggattacgcatcgaaggcaacgaacgacatggctgtgattggacagcagatcaccaaatcctactacaaaaaacccgcaaactattcatattttgccggatgctctggtggtggaaggcagggcctcttgatggcacagaagtacccggacgtttttgatggcattttagccgtcgctccggcccttgatatacaacgtttcatccctgcaggcttctgggcctcacaagtcatgaaccaacttggagtttatccatcgccctgtgaggtcaatgctttcacggaagcagccgtgaaggcttgcgatcgactagatggggttgaagacggcatcattagctccccagatcactgtcacgtcaaggctgccgactttgttgggatgagctacacttgcgacagcattcggaaaaccttcagtgcttccagcgcggaagttatccaagcggcttggtccggttctcgctctatctcaaagcacgatggctggtacggggtcaacaaggatgcagcgctcggcactgcctatgtgcctaccgcatgctctgcgaaaaacgcatgttactcttttggaagcgacttgtttggcaactggctcaagtatcttgttgctaaggactcgaccttttcaaccagcaatatgactcaggaggagttcttcaaaggcctacgctcttcaaacgttgattattcagggatgctaggaacgaatgaccctgatctctccaacttcaaggcaaaaggtggcaaaatgatcacttggcagggaatggcagacgaagctattccaccgcttgggactattgcctactatgaggaagtgctgaagaacgacccaaaagctcaggacttctatcgcttcttcgaagcacctggtgttggtcactgttacggtggacccgggcctattccgaacggagcaatgtcccaactggttgaatgggtcgagaacggacatgcccctgttgttctgcatgccaccaaaggtagcaacaatacagccagagacctttgcccatatcctcttcggcaaaagtacgttggaggagattctagaaatgcgacctctttcacctgcaccaaataaagttttccttttgaagatttgacctggtcagaccaataatctatagaacttattagcaagcttccagtttgggcccttaaatgaacttttttcttcgtgcctcctacccatcacattactccctccagaagtgaactgaagcaaccctaataaataaatcccaaagctcgggcgattgtagcattagtatacccatatgatagtaacgatacctaccttgaaaaggctatttagcaaaacttttagaataatataatacatcttccacgttttggtaggcaacacaaattttctacttagggtcttccgcagaagcattgtctcgctgcttccaattgaatcggaatctaccaccctaaattagctcgaatttcgccgggtaagctatctgattgaagacttaatcttctcatctaagctgaaacaccatgtgagcagccagtatatatcgcagaatcgctacgtgccaaaagccatgatcctaggtacaaatgcctattgagggttcgtaagacaatttcgatctattttttttggcttgtaggcatcgggccaacattgtggaagaaaagtatgcgccccagacgataacaatgagggtgtagataatgatgacagtccctataggaatagtggtaaatttccatatggcaatagtccctttttggatcgaggtgccccaagacacttttggcgtgtttgttctgaacgagatacgtcctgtctgtcactgtacctttcttccaaattctcaagctcgatggaaggtacagtttcctgagaatcggtatctcgtctactatatcttgcatgttgactcgacgcaaaatcatcggagtcacaaccaacggcagcgatcatatcatgagcaccttgaggctgcctctgagccatcagctttccaccggccagctgcccatgaccccatctcttggctactccccagacattgcaccgaagacgttcgcagttggtggtgctgtattgttgctgccggactatcagatcctcgccctcatctcttttacttcttacatggagcagtccaaagacacttaatttgcccgcaagcactgaactgagtggaaggctgccgtcaattggtttgcggtatatcgtaaagattctactgaactcattgacttttcgcagttcggcaatgcctttctgggtcccaccagttgctcagccgtcaatgccgcctctgtcgacgcattcaaggacacggcctctattgcttcacccgtcggagatgtttcatctgctaagaagtgggctggaattgtgacgtgccaggtcttgcaaagatagaacttgaagagtgcattaattcagaataactaagatagggaggaagaagaagcaagttgcaaagtggaaagcagatagtgaagagggaaatgcacgatgggcagcctggccatgcaggcaagacgaggacgacacaacaacaccaaccatccagggggggtcagctagcaagcatagggatcacatagaccacaccatagcatataatctcctagtacacaaacatctcgcaactcgtttttcattcttggggtgatgatccgtctagactacttgctccccgaaactctacttgacaaccaggctttcgttttctctgcctgaaggacaaggccactaaactaggcatcccgactttccccactgcactagttaactataaattagaaagaatgaatttagaatatcttatactattttatactagattaggttccagaactctactttctgcagaccgacctcgactatacaagcaacggtagtccacagtcccaacagaaagttgtcccaatgaatacgcccgccactttcaagcttcttcgaatcgaaccgaacaatctgcatcacaatagaaacggtccaaactctccccactgcaatagttaatatagctgctacttttcaaacaatgcaaatttcgaatcatctcgctgaactatctagcaaacaatctagctaaagcaagcaagcaaaaagagtatgacgagtggatcgtaacaatcagggggagagggaggggacaaaacctacactctacgcagcaggttcgtgcctgctgaatccgaactatgttatggtaattacctagagtacgtctatagcttccttttctatagagacgagccggtcagccaatcaaagtttatcagccaagtgaagaaagtaaataaggaagtaggtgtttaatttcatcttgcatggctgcctattccagccgatatcactagctttttaccttacgttcatcaattgagctagtaagtttctcttaggtttctcttacttttctcttacttttctcttacttttctattgctctcactttgttctgactcttttgaggaaaaagaaaattcctcccgggacacaattaggctggccacttttcgatggggcgtaatcctgacccttttggtctagcgcccttagtcctgatgtgttcccgtgttcccgtgcgtggttctattaaacccccatttaaccgtaatacaccccatcatcttctgcatcaatcttttcccaggacattctcatctcgtcaagatcgcacatcatcaaccatagatcccatagtagcagcgaacgacatttcatccatcccggaaaggtgtcatattgatcgatttcaggccacgcttcgaggaccttcgcttaaagcactgtcttgtatctttcgttattggtgtcctgctctaaggtttccaccgaagtgcctaacagcgtctgtaggcattccttatcaatgagcatatacattcgatatttattgaatttatcgcgctgaccctatatatcgacccaggccaaagtaagcgcgtattgtatcaagcgaggcaccgtcgaattgcgccgcatcttctataatggttgaactatattgcgcctagattccctagtaaagggcgggatttaccccgggtggcgacttattattccatttgtattccccgaagaatgaccttttgatacaagcttcaagatacttgacgacagtagagaagggggagtcagattgaggggaataggtggtgcgatagataatatatccccaagtccaatgagctttagtttattatatagctcctttgtaggtgcaggtagaggagcgaaagaagcgaaagaagcgaaagaagcgaaacccatcttatgaaagtttgaagaaaggcaaggatgagatgtcccaaaagattcccaaggagaagaagggacaaagagctatcgactttaggcggtcggtctaaccattagtccggaagcccatttccaacacgaccggttacggactgctcctagcttcaagtccaactgccaccttatatctgatctctcttcacctgcgcatctatagctagctcatggtattgctttcagggggccacctggaagatgccataacgtttatacttcaatgttctgatcctcggcatcttaagttattttactaaggtatctagagctttgactccttctatggttctttagataataaatacagcgtttaattgagtgaatggctccatctcaagataataacttcagactttcgggcctccatatagggcagtaaaaagaaaagcaaacaagtaaacacctaggtatactatgcctaagggcgaaggtccagctttataaaaactcaattctatctgtgaaggccggctcgtctgagtcagagttagaggcctcctcctcctcattatcattacctggaggttctttgttcgacgcaatcatggcctgatatatatcctctgctacaatgatcctgctcgtagccttatcagtcccgggagtgctttcgaagtccttaaaggttctttcctgcactaaacagtctggtagcttgtggccggaaatacttctcgacaatgtctttaatatagacttgcagagatattcgccgggtattagccagaataatctgatgttttagtcgagactgccttccttcttgcagtgtatataggtgatgatgaatcggaaatataagaacctcttagctggccgtgcattcccaagaaacttcaattcttttccgtccaggtcctagaaagaggttagctaattgcccaggctcattgaaagaaatattagcttacatcccatgtagtgcatgtcgcgttggcgctgtcttcgtttggaaagcgcttcataactgttgtgtgtcgcattgcttcgtgggctaacacacacttccaacgcgaagatgtcgtgacatcgagctccacaccaagatgtcttgggagtgatagcggaacaacgctggaaagctcactatcacgataatcacgcttgagcttgaataccttcatcacttccttgcgttcttcggaacagttttatgtgatttggcggcactgtcaatctcttccaccttctcgccaaactggtgcttggtgatctttcgatctaagaagtcccttgagacaacgaggagacgggcgtagaaaggtgctttcgccgaactggaaaccgaagtcatcccatagaccgtagcatcccgcttagagctcttcttgcgctcattgtggatagttgctctatgacaggttagctccgtaatatcaacatagcaagttatataaaatactcacccatatagcctaaagcttgggtagccccgagctcaatgtccgacctttttgcttcgacaatcagtacgttgaggcataaagtctcgtcttcctcgtaccagatcccgtagtctagccgggctccgaggtacacccttttacccttaagcctgactgggccaaattggtaggctctttctgtctggacgttcaggaattggccgtatggcaggtccttcgaaacgataccatgtgcttctagcaacaacgcgtcgatgatccgtctaacacctcagtgccagtgttcgagctataccacattagcaatttcactctacctcttcttctgattcttctttcgagctccatacctaaatgcttagggattggcataggcatgacgttctcaagttcattgtcccgtgtgtcaactttgaggttgaaggctttcaagatttctttgcgggtcaatgaggacaacggaacaatcttgtatggtaaattggcctcgctgatatcgtgaacggtctcgcgaagttgacgttcatcaacatttcgatccagaaaggccttggtggcaagaatgagtcggtcgaagagatgtggtttgctggccgacgctttggttgacattttgcgttgcgatggacttcgtctgaaagactggtgagatctgaaaaagtactggaacgctgaaagtaatctgtcggggactgacgactgagaagaaaatgataagatgaaagaaaagaaaagaagaaaagcaggagaagggactatggaaggcagaaaatcaacaaagtttactacctccactacgcaatccacctcatctcgccctgcttccgggacttctcagtctgtaagctaataagttctggctcagtcgggcttttgggccgtttggattgttgtggttgggctccttggtagtgccggctttattatttagaggccagcttctaagggcaatgatcctgagaatatcatgtaagtagtaaaccatgattttcatagaaactatattggcggacctttgcctatatatatattaaggctaatatatcatagaatagccctaaagatattattataagcgagtaggtctacgaagggcagggtattgatacctattcccctccgataaaccctgagactctagagacccctataccctctactatacctaagaagaagaagataaagaagaagaagcggctaactactataagatttacctattttactaccttagcgcgtaatactctctactagataaaagagggctagataaatcagctactagttagaataaagtggtgagagagatatgtagaaggttttattctctacaacgatcgagatctagtcaaatagctaggtgaagcctggcaaaccaggcaacggcatgtgatcggcacgtggccaccacaacaatatctatacgaaaacaatccaagtttataaatcgaaatttcgaccagacaaggtttagtgccgggaagcttaattgtatgatcttgctccttcctcccctcgactcttctctttcttttcctcatcccgccnnnnnnnnnnnnnnnnnnnnnnnnnnnnnnnnnnnnnnnnnnnnnnnnnnnnnnnnnnnnnnnnnnnnnnnnnnnnnnnnnnnnnnnnnnnnnnnnnnnnnnnnnnnnnnnnnnnnnnnnnnnnnnnnnnnnnnnnnnnnnnnnnnnnnnnnnnnnnnnnnnnnnnnnnnnnnnnnnnnnnnnnnnnnnnnnnnnnnnnnnnnnnnnnnnnnnnnnnnnnnnnnnnnnnnnnnnnnnnnnnnnnnnnnnnnnnnnnnnnnnnnnnnnnnnnnnnnnnnnnnnnnnnnnnnnnnnnnnnnnnnnnnnnnnnnnnnnnnnnnnnnnnnnnnnnnnnnnnnnnnnnnnnnnnnnnnnnnnnnnnnnnnnnnnnnnnnnnnnnnnnnnnnnnnnnnnnnnnnnnnnnnnnnnnnnnnnnnnnnnnnnnnnnnnnnnnnnnnnnnnnnnnnnnnnnnnnnnnnnnnnnnnnnnnnnnnnnnnnnnnnnnnnnnnnnnnnnnnnnnnnnnnnnnnnnnnnnnnnnnnnnnnnnnnnnnnnnnnnnnnnnnnnnnnnnnnnnnnnnnnnnnnnnnnnnnnnnnnnnnnnnnnnnnnnnnnnnnnnnnnnnnnnnnnnnnnnnnnnnnnnnnnnnnnnnnnnnnnnnnnnnnnnnnnnnnnnnnnnnnnggggcaacggccacgagggccaaggcaatcgtgggaagggcgcttcccaaaaggtatgcaagctggcaaccatgtaacattgatgctaaatcatggtagaaacgcaaccggggtcgctgcggtgtgtgcggtgtgcgcggccaccgcacccacgaccattggcgatatgcccaaggcagcgccaatgccgggcaaggagccccagtaatcaacatcgctgtaagaagccattctttgacaaacttaaatctagaagactgatactgactgatggacataggggtcggttttcggtggggtcgcgggagtgggctccaccaccaccaatttggcctggggtcgtggccgaggccagaaccgaggggggcggggcggtgggtggagaggaggaagaggaagaggacgaggggcgctgttgccaaggggtattgcaggccaacccgaccgactggaacagctggaggctgcattggcccagcagcaggagaccattgctcgcctccaacaggagaatgccgagctgtcgcgcctgcgactccaagaggggagcgcagagcaggccaatgaggagccgactgatgctctctctatcacagacggccttgatgccgaattcgaaatcaacctggatctcgactccgacggagaggagatgaagtagagtccctctcagtagatgtctcgagaattgaaactttcatcttcggttgcaattgccggttacttttttttcccccaatgatcttcaatgtaagttcgatataatgacaagtcggttattgtacgcggccttcttggtaaatgcacacccgtggggcgaggcattagtacgaagtatcgattgtggatctggaacaagtctaattaaaattaggacaccatttaattcacgtagactgcgtcatcgacctcctgggaactggcggctggcaactgcacgcctttccatcactagacagatcagatgaaaccttcgggagatcaattgcctgatcggaataattattggaggatctcacaaacaacgccgtggatttgcctttggatacgccttcacacctggaagatgatcattctgtcagcttttgagtgcatcgaggaatgcggtctgtttcggggataagcgagcttcggtgctatttgttttcgaattgaagtgcgtagacttgggcaggggtcgtaggaaacgagcggatttgtggtcaatatcagttaggtgaatgaattggttatccctgcatttggtgctgagtatgcctatgcagtatggagaggaattgtcttcatcaagcaagttgactgactggttggttggtcggagagattgaaagtctgaaatctgaaaatgcgaggactgaagcacgaggagagccctcctgccttcctaactagtggtttctcgcttccatctcatctttcccacactttcatctcgctcttcacacttccgaaactaccatcaacagcattcatctacatcatgggtaagcaaatccgcgaacgtgagaccgtcaactcggctctacctcctctactgatgacagatttccatacgagctccaatgccgtacacccacttgtttacaacggcgacttgaatcattggccaaatttctttcagaatgtacgagcaacaatggataaccaacattggagcagcagcgttatcggatacaccctgaagacccacaatcttgatgacaataaggactttgtcggagatgagacaggtgtacagggaaggtttcaacaggcgatcggccaaacacttggacaggcgtttgaagctcaaaggcttgatatccggtttgccgattccaaatgtcttcctaatccagggggaaaagtcccagattgtactatgaagacatcaaggaatgagttgaagcttgtgggtgagctgaaggtgccgtgggttgtccatcaccgtatcgagcgtcgcctaaagttcgagcccttctgccaaaattctcattttcgggtcttagtgggccagattctcggatatatgaaagagacgggggtgtatgtacggctttctgtcgaattatgaagagacgatctttctccgacaacgccacgacggtacgacatgggtcgtggattgctccccagtgattctggcgtccaatatctacaccaaaagatctccggtggtgaccgtgagagaatgctttttctatattgcgatcctggcgcgtgggcaaggcaaggttgataaccaactacctccaaaagctgggtggaatcaataaaatagggcacgagaaaactccgcttcatttatggagctgtgagtaagctcccctctcctaccaatgtagagaggtgtgggtatctctgaagacaaaactccccatgcgagtggatccctttcctttgtcgaatgtgtgatcaagtgtatagaagtcttgacttagcgctccattcagtcttcaatgaaacttgtcaacctactcaaatttcctcgctgctttcaatctgatttactatctggagtagtcgtaaacttagggaatcgtcaattcatccttgtaactccctgagtgtcagggccgccctctgaaccttcgtaggctgaccgttccttctttgggtgttcctattctttctcccttctcaatttagccgccacttgatatatagaccaatggtctggtcgcttctctctatatattaggcgaatacagtatgggattcaaagagtgcatgggccctgctctcgttgggcaatcatctgaccaacctcgattctcaccctacgcattcgacttgcaaccggtgatctctcccctgctggactaattcttcccacaaaactccacgtttgtttcatccgacaaaacatttaattgcaacaaattggcagcgacatgatcgatattctacgcctttttacgcttcgacttcatcaatttgagggttttcatactggcctgagaatttgcgccgattacaccacctaaacacctagcccgtctatctaggaatcttcgccaaagcagtggctcatacgcaaggtaaacccgggacccgggggccatggtagcctctgaaggacaccgcctctctgagatctgccaattttgggtccgctttgcattaagaagggtcgttatttcaagatttttatgacgcaaatgccatggaggcagatggattagcatatttgcttgcttcaacagcgggtgttttaccactatcattgccatcatcgtgatatatgtgatcaactttgacttccattggacttttacagttctcgaggacttgattacgtccagtatgcagtatatcacggagactgacatgcagcgttcaacctcatccatcgaaattgacatcacgctctaaacggcgaatcggtctatcacacaggtagaatatggaggcaaaattaggattcggacctattatgatgggtctggatcagtagatattactctgtcaatgtcagcaataattccttgagaatggcatttttataaaggccatccctgctcataggcttccaggcggtgccggtccgaccatcctaccgattatgaattgatgagacaccgtgtttgatgttttgatgtttgttggcactggagttttacgttttccgaagttgcttggcagttagttcgtataatcatgaatgccgtagaattgtattatagcataacttcttcctattgatatcaatcgaatgattccttagtttcgaaaacgtggcctatggataagctttaggataaacagagtcgagtgtgacttatacatgcagagtccagaaatttcggctacaggcctccacgctattagataagatctggaacatctccattgttatatttgagagcaaaagagcctactggaggaatattaagtgaactttgaataggtggaaacgtaaattcggagatcgttaagaattggattgatcacgaagcaaaatcttggaagacaatagaatattactcgcaccttcaaaacaggggagttactccaagaagaaactcgttatgagagatactcacacctcaaaaaaggcggagagtttaccttcgaggatcactgaagcggtacctggatgttctccctgtcatcaatatcaatagaaacctgcctgtatcaccactcccatttatcaagatcctcacaaatgttcccccagacgtcgcgcggtggtggctcgatcaagttgaaataagccagaatgcgatccccccacttgtcgtcagttggatatgaagcgcgaaacgctgagatccatagatcggcgcattctttgtcccatataatctttgtgatatccccccctcctggaccccagccaaaggacgacatatccctgactttgcgttagcatgatctcaaagacttgactccgcacttactcatatgcagcccggaactttcggcgaacgagatcacgttttggtcgctcgaatgaccagaagagttccggagtgaggacctgcccggggaccttttgccaaacaagataggttatgtatcctccaggtacaggtccgttttccccttgcgtggattggccatatccaagtagtgaaggtacacttttgcatccaccttggctgaacttcttccgagctttggcttcccgcttttcaaagtgaggatttgcctgttgggctcgaacctccggcaggaggaattctgttccctcatcaggaccttgacagtagactctcatgaaggcgtgattattggggaaatgttgatcgtgacatagatacttagcctcccaaccggatggctgttcgtcgggatcagaagtaggctcacgcactccatcgactctattctcataaagcttctcgtcgatcacccatgtactcgcattcagctggagatctgcggagccaggaagggcgatctgagtgcctttgaagatctgagagatatcagtcatcttggagattagatgtagagtgcggaagaaggttgcgaggatgaaaagggaagagatttctgagagcacagaagaggaaaagaaggaaagttcggcattaagtgaagggagatggactttgtggggtcaaatgattatttggtggtcattggcttgcaccatggtacctgaggcaacaccgcactacgaaggggcatagcggcggcagagaaaaaagaatgaccgaattaccattacacactctgtttctcttcactcttttcgttttccttcccacccacccccacaaacttatttcggccagtcggcgagggtcaaagatgatggactggttgctctgcttgcgatggagcaaagtcaacgcttaagaatgtggggatgtggatctttgtgggtcgggaatagcctgagtctattataggaagaggttctctctcactacagcctcatgatgttcgaattaaggaggcaaggtagaattgtattataatgatgatctaccatgtcgattttgaccatagcggggcacttcacagtctcgtcttcttcaatctcatacttgtatcctactccaaacgcttcgagggttcccagctgcagaaggatttttttttttgtaaaataggaagctatgaacgtagttacgacgtagttggtacagattaagcaggcacgatgttgcgtagagggtacatcgtatttcccccagcagcgtaaaattgtattcacaacatcgcagccatggcaagcaatattccgaataccataaacatcgttgatgtgcttcccgcccctagtctacctacctccactacgcaatccacctcatctcgctctgcttccgggacttctcggtctgcaagccaacaagttctgactcagtcgggcttttgggccgtttggattgttgtggttgggctccttggtggcgccggctttattatttagaggccagcttctaagggcaatgatcctgagaatatcacgtaagtggtaaaccatgattttcatagaaactatattggcagacccttgcctatatatgcattgaggctaatatatcatggaatagccctaaagatgttattgtgagcgagtaggtccgcgaagggcagggtgttgatgcccgttcccctccgacaaaccccaagactccagagacccctgcgccctctatcatacccaagaagaagacgaagaagaagaagcggctgaccaccacaagattcaccaacttcactacctcggcgcgtaatactctccaccggataaaagagggctggacaaatcagctgctggctggactgaaaggctcggtatgctaaggagatgccgaggcgacgggcgtccctctgttggtttaccctttttttctctccgagaaccttagcgaggtgagatgaattaaaacggaactttttactaaaatgattcggtgtcgacgaatcgtcgaaattccattgcccaccctgagaatcggcccatacactacgccctccaacgcgatgcgcaacactcgtggcggatgcctcccccctcctattgcacatcgcgatgcctaatcaaggcagagataatcgaactcaaactcacaaggaaggccttggtattttaaggagccctgtctccatggccttctttttacgagaagcttatcgataatcatcgagcccaaaggtggtgccgaggcactggagcatcccggcaagccctgcgcccaagaaatgataacccagagagagtctgcgtcggagatgagcacgggcttcaaggccgcttccagcaggcaattggccaggagtttggagcggtcctggaggcgaaatgggtcgagttctcgttcgccgactttaaatgctcgggttccggatacaaaaaacgcccgatgttgtcgcgttgaattagaattcaaatggactcaatatcaagcttgtcggcgagctgaaagttccttgggtaggcgcatagactaagtgatgcgattaccaacaaccacgctggactcgtcatcaagctggcacagcccctgagagacatgcaggagctgagttgtgagtacggatctcgacatatgacgaaacagtcttcttgaggtaataccggtctcctgcaggggcttgggaggtatggtactccccacccgttcgatcaatcgactactatatcccaacccctctagcctcccagggggctggtagtacgttcactcaggtgtccatgaaacagtgcatgttctatgtatgcagtatcgcaagtactgctgaagaaatagataacgacacagagcattgggtgaagcctaagtgagatagggttcatgtatgttatctcataggactaccttttctgtgaagtactggtgatacgagataatatgaatttcgaagctatcgcagtggcctatcgtccctaccccttcgccaccagatccaatccgacgtatttagatgccggccgctcttttcagggggtttggccaaaccccacatttcataggtgagtacggatagtggttggtcctcaatcttcgcagcaaagcgaaatccagcgaaatgtctaatataccaagtcaatgatctgcaatgttcagatagccgttggggacatgtgcttctggtccttgtctatcctgcccatagcctgaaagccctgggactgcttgacacttgcttttgctaagtgtagtcactgcctcgtactctttgtgcacacggctgcttcagcttggagctctctgacctcccagctactgcggagggtcttgtcgtatggtatctgaacatacattcagatgaagccttcttcagtgggattggcggtattgtggcatgtgaacttcaggacggcgaagggagggccgcccagcttgtcccgctcatcggaggtaagggtctgataatagaccaggcctgatttagctagattatgaccatacagtcacgtgggatttttatgtcccgatggtccatacctacatacagaatgaaccatcattatcttccccagagcttctacagtcataatttacgtagcataggaagttaggatcggtcgctttgctctgcgacacgactatctcggcggactgcggccgccgagatcactggtagatatatggtaacaatcatgcgcttaagctggttggtaatatggcactagtcctaattagatctgtcaagaatgggatatgacccctctaggccctaaacaggaaccttggtttttgttaaggtctagtggtaaattacgctgtacgaaattcgacaagatctataaaatcccctatacggaatcaccacgattatctcccacaataccatgtacaaacgtggtctttccgctgtaaaattctttccgtaaattacgttattaggcctaccgctgtgtatcgttgtgcgtggttctataaagtcctccctatcgcccttcaactttctggctctggctctcctggctgatattaagaactctaacttttctaaaatgacaaaacccgcaatttcaacaatctgtgcggacatcgctaactaactgtaatacacactcttgtatggtatgccgagtaccaatggccggctttctactcccttagcttcctagcttctttggcaatttgtgggtacacctatcttgcgccggtaatggatttgtatcgttatctcttcgacgatctgtgtgataaataattctgtatctactcgtgccgttccgcggaaggcatccatcactaatcaggaacggcgataacggcgaaagggatgattcgacatcgtctttttaagtaaatcgaccgttctcacgtattgtgaatacttcctataaaacgcagagccgcgactaggggtataagaccggctctgatttgcactatggtaaagtaccaaatacaaaattaatctgaattatttctaccaaatgcttctatctcgtaacagcgtaagtcaagtggtccatgtataatcatcctatctctatctaaaatctagggctcactaatctagaaaattatatatacccttctatcagacatgtagttcggcctaggtacgtacctacgccggttcctagtccacagcaaagttcaacgcgccgtatactagcgaggctacggaagtgcataccactaagctattttaggtatgaacttgtccgtagtaccatagagggaacggacgtctctctgacacactctttttagtaaatgtccctcattagaaaatatctgtccctattgagttatcgtccttcaacagaatagtccctaaatctctgtgatatggcttcattagagccgcacaaggttttcctgataacggaattccttgaactgatcctactcgcaactaacacgcgcactttactcgcatccgctcaaagagtcttccgtaaatggcacttcctgattcgggactcgagcgacttacaggctgccctgttttttaagcccgtcaattatactctaccacgcgggacgccgggaattcgcaacccattgctagaagaatgtatatggccatggttttgcggaagacaagcgcacaagtggaaagcgccgctagtagagggaggggcgaagatacctcagatcgatcctcagagcgacgaagtctttctccgaaaaggcgcaagctggaaacgaatgttatttcagcagcctcctcgatcgtgtattggatttatagagaaggatggaaaggccgtgaatggtccggcatataccgaagtgaaagttcaaccgaggggtagccaaggctatttacgaatacgtgacgtggtactcccttgtacgaatatcttgaatgaagttcaccctctgctagatgaaggactactctggtacggatttattgctgaaaggcaactaccattgaatccttgggaagaggaatatcgaacagatagcgagaggtacggagaaatctcgaggagccaggtagcatatactacctcaatatatctgcgggactgtgacattgtgttttttattctagaatgtggatgcgttcgaggacaatgggttagcaatcatggtgctaggatgttacattttcggctctgtcgtatttggatgagtcttgtgcctgggcagatttctattccgatgccggtgacctagatttctaaggatatgtacgttaaatgaagtggcgaaacaagatgttcattgaaaaccaaagcaatacatatttttagctaaaaatggtactcattccaaccggttcgctatagagatatcctcaccggcagagctaatgaatggataatcgtgggaggtatgctcatgggtatgtagtggccggaccatataattaggccttgataagtgctgcagcacctggggaattttggtactgttgtccgtattgaatgataatgttaagacatataaggctgttagattggacagttgatgtgtaagtagactacatgaattggatgattgagttgattaagttgcttagttataatatatttctcgttattatcctttttatatatctagtgcagtggggaaagtcgggatgcctagtttagtggccttgtccttcaggcagagaaaacgaaagcctggttgtcaagtagagtttcggggagcaagtagtctagacggatcatcaccccaagaatgaaaaacgagttgcgagatgtttgtgtactaggagattatatgctatggtgtggtctatgtgatccctatgcttgctagctgaccccccgggatggttggtgttgttgtgtcgtcctcgtcttgcctgcatggccaggctgcccatcgtgcatttccctcttcactatctgctttccactttgcaacttgcttcttcttcctccctatcttagttattctgaattaatgcactcttcaagttctatctttgcaagacctggcacgtcacaattccagcccacttcttagcagatgaaacatctccgacgggtgaagcaatagaggccgtgtcttnnnnnnnnnnnnnnnnnnnnnnnnnnnnnnnnnnnnnnnnnnnnnnnnnnnnnnnnnnnnnnnnnnnnnnnnnnnnnnnnnnnnnnnnnnnnnnnnnnnnnnnnnnnnnnnnnnnnnnnnnnnnnnnnnnnnnnnnnnnnnnnnnnnnnnnnnnnnnnnnnnnnnnnnnnnnnnnnnnnnnnnnnnnnnnnnnnnnnnnnnnnnnnnnnnnnnnnnnnnnnnnnnnnnnnnnnnnnnnnnnnnnnnnnnnnnnnnnnnnnnnnnnnnnnnnncgggagcgcttttagttatgtcacatagccgcttagtcatcctgctctggaaaccactgcagtaaataagtaaaccgcggcgtagccactaagccggctgcaggccattaagcaagtaagtaagtaaataagcagataagcagataagcctacccctaccgcctaaaggctcatatagagtatataacctacactactccatacagtaggtcacattaggacagactttggttcgtccacgctcagcaaactataacccgtatgcgtcaccaccccgagtggtcgcttacgggtagctggtacctctttaatactcccctagctttaaagttatagtatctctaaccccttatttataggaccatacttcttccctttttattgagccttggtttagtactgcagtgttacaatcgctatgtttgtatggtttgcatgtttgttatttgcagcgttacagagtgccggctatataagcaggccctctcccacttctgcacttgcttcttctctcttccttatcttagttatcttcgtcggaatacactcttctgttgtatatgcactctttctttattgatcgacctggaacgtcacatgcagcactagtgctgtaggctggagaagcgcctgcatagtcatacataactagttagactgcaacaggttgattgaactttgattgattgattgagataacgccgagtgtatgatcgtatcactactactctgtcataaggacatcctcaccagccgagctactgaattgacggtcgtgggaggtaggcttacgggaatgctctggagatttttttgacagatcagtcagttccggtggctgtcttgcaaaatatgtgatagtatcgtctagccagattagtcaatatttattctgccagctggattattctgccaaagttagccgatgacatttcaccgcattgattcagagaaaacaaccgtcacgtgacatatacacgaggttacgaagctccgcaattacaagtatgaggtgtaagacgtatgaatcacttattctttactcggcaaaaaattacttttgtcgtagtggtctgatccgtcgcccatactgggctcactgtacaatgtacatacctttggtgcagtccatcacccgccgcaccccacaaggctgatgagccgaaaccttatcgaactagtctaggtccacgggtaaatactaaactcccgtctttctttcttctcacaatctcctctcatcttacatctcatagcaccatcacttggttcatcgcagcaataccatcaaccacactctcgccacaccactaccagctcttcagccacgctcgatcaaccccattattaccaggatgagctggagcacggaaggtgcggagggtgcggagggtacagagggtaccgtcagcgaaagtatcattgccacagatattgtgcttaaagagcatcataagctcttcttcaagctcaaaacctcggcgagaaagttcctgggcaaccatatcgaccgacatgagctcaaggaaacaaccgacaaactagaggataagagcaaacaatataagagcgtccaaatctcagaaataaacgtgaagaatgtagaacagtggctctatcttcaattcgatagccatgatatggagatgaaggacgtatagtcgctccccctctccccctaccttagtacgtaatccaagatatagagaagagggggaagctggctaattgaatatagtgaccacaatgggtcctattgagaaggcttttagccaatctagaactactgaagctagtgctcggtgggttattgactctattattcttaacgcctatacgactgccactttaaatatcaaaaatgcgcagccgttgaatatccaatacgagagggattataatttttggcccagttaccattaaacgaaagagggcgattctctctaggagaccaggctatagagtctggtattgtgacgatctgagaggatcgtacttgcccaacggggcaggagcggtcacgtcctcgtacttgcctgtcaggaccccagtactaagaaggctgatgcctgaggtattgtacctgtcagggtgcgtggggaactgtggactgcgcaggagccatatgtgctgcctacgcagcccccttcttatcatgtgacccacaacctatatattatcctcgcatactgcttctcaggagaagcagctattagttctctaatataccactacgtatactcttgtctctatttcccgatcctccattatatacagtattcccttaggcattccatacctaggggtctcacagttctaatagctcttaaatactcggattgcctgatagagactacccctcgttcataccagttcgtatcatatcgaacctttgtaatacaaggtcgcagggactccctataataccgcagcctaacgaataggcttcgaccgattaaacccttcctcccgctataaataatcctcctacagatacctcggagttgacgtaggaaactactatactactagacctaacgctagcgcagcaccctacgaacccctctttattaacccttaattaactaaggaaacgcgttaaagaagctaaggtaagagaggaatactaaaacctccttgtagaattagaaatcctagagtaagcgaagcctcctactctaataagtataaatgactgtattatactataggttattaaaaaatactatatttgtatactaagagagcctataaacgttaaaccattctatagaaatataatctaggaatactatacctttattaaccaatttcagtcgcactttaataagtactagtaatagtataacttcggcctatataaggtagaggctgtagtcgaataactagataactagagaaataataattagcagtcttatataaagatatttaaagagcctgctatctaataagacttctaagacttctacctatatcttataaataatccttaaaatatctaccgagatagtatactagagtacagtactctatagtagaagtaatattaatctatacagatatttataatacagcttaatactatctatcgttatctaaagcacctatacagtcaacagtaccggaaggagcacctctaggctaaagtaatcgatacagtttatactaagtcgttaaaatagcctatagagctagaaacgtataaagcatatatcggacacctttctataatagaaagttaaatccctaactagcagaaatcgctttatatatagaaagagaaaagcgctagtagcggtaagaataacactactaaatcagatctaagcccagatactagtcttagctctcataccttatttacattaggaacaaagaaacgtaaggataggtttaaaaccaaaggtaaggataagtagggcaataaatctaataagaagcgtaagtataataaataaaaaataaatcccaatagtatcccctatagtaactactttaagtatagaaagccaggccactacatagatacctataaagagaccaaaggggattcacaatcaaaaaactgattgccctagcgctcatagtatcggcagcattagggcttaacggtatcaagcaactaggttaaacagcaccttctatatacagacgcaggcctcccaaaacccatcatggctatagacagccatatagtccactcctatagctcctataagctaaatagtaagctataagatagcaggggtgtggtataccaatatatactctcctataaagcagttaaaataacaggctataacctaatcattagattcaattagctagaagctgttaatcctaatattaactagaaaaactaggtatagtattatcgcctatctagtaagaagattaagaagataactatagcagcctttatataagagattctctacagggcccttatacttacagtatatccttatctaattacaaaaggtaagcctatcccactcttcgctatagtaaagggtacagagaaagctttacctatctaatatttagactaggctaatatctttaatcctaaagaagtaggaaagttactaaagagtaataagtataactatactattaagatagaagtaggcaaataaattccctataagccaatctaccctctttctaagatagaacttacagtactctaagattatatcaaagaatatattaagaagggctagatcaggctattacagagcctaataggtatacccattttatttatactaaagaaggacagaaaattatatctatatatagactaccagggacttaatatattaactcttaaaaactaatatcccctactattaattagtaagactatagattagctatctagtataaagatctttatataacttaatttaaaagatatataccatnnnnnnnnnnnnnnnnnnnnnnnnnnnnnnnnnnnnnnnnnnnnnnnnnnnnnnnnnnnnnnnnnnnnnnnnnnnnnnnnnnnnnnnnnnnnnnnnnnnnnnnnnnnnnnnnnnnnnnnnnnnnnnnnnnnnnnnnnnnnnnnnnnnnnnnnnnnnnnnnnnnnnnnnnnnnnnnnnnnnnnnnnnnnnnnnnnnnnnnnnnnnnnnnnnnnnnnnnnnnnnnnnnnnnnnnnnnnnnnnnnnnnnnnnnnnnnnnnnnnnnnnnnnnnnnnnnnnnnnnnnnnnnnnnnnnnnnnnnnnnnnnnnnnnnnnnnnnnnnnnnnnnnnnnnnnnnnnnnnnnnnnnnnnnnnnnnnnnnnnnnnnnnnnnnnnnnnnnnnnnnnnnnnnnnnnnnnnnnnnnnnnnnnnnnnnnnnnnnnnnnnnnnnnnnnnnnnnnnnnnnnnnnnnnnnnnnnnnnnnnnnnnnnnnnnnnnnnnnnnnnnnnnnnnnnnnnnnnnnnnnnnnnnnnnnnnnnnnnnnnnnnnnnnnnnnnnnnnnnnnnnnnnnnnnnnnnnnnnnnnnnnnnnnnnnnnnnnnnnnnnnnnnnnnnnnnnnnnnnnnnnnnnnnnnnnnnnnnnnnnnnnnnnnnnnnnnnnnnnnnnnnnnnnnnnnnnnnnnnnnnnnnnnnnnnnnnnnnnnnnnnnnnnnnnnnnnnnnnnnnnnnnnnnnnnnnnnnnnnnnnnnnnnnnnnnnnnnnnnnnnnnnnnnnnnnnnnnnnnnnnnnnnnnnnnnnnnnnnnnnnnnnnnnnnnnnnnnnnnnnnnnnnnnnnnnnnnnnnnnnnnnnnnnnnnnnnnnnnnnnnnnnnnnnnnnnnnnnnnnnnnnnnnnnnnnnnnnnnnnnnnnnnnnnnnnnnnnnnnnnnnnnnnnnnnnnnnnnnnnnnnnnnnnnnnnnnnnnnnnnnnnnnnnnnnnnnnnnnnnnnnnnnnnnnnnnnnnnnnnnnnnnnnnnnnnnnnnnnnnnnnnnnnnnnnnnnnnnnnnnnnnnnnnnnnnnnnnnnnnnnnnnnnnnnnnnnnnnnnnnnnnnnnnnnnnnnnnnnnnnnnnnnnnnnnnnnnnnnnnnnnnnnnnnnnnnnnnnnnnnnnnnnnnnnnnnnnnnnnnnnnnnnnnnnnnnnnnnnnnnnnnnnnnnnnnnnnnnnnnnnnnnnnnnnnnnnnnnnnnnnnnnnnnnnnnnnnnnnnnnnnnnnnnnnnnnnnnnnnnnnnnnnnnnnnnnnnnnnnnnnnnnnnnnnnnnnnnnnnnnnnnnnnnnnnnnnnnnnnnnnnnnnnnnnnnnnnnnnnnnnnnnnnnnnnnnnnnnnnnnnnnnnnnnnnnnnnnnnnnnnnnnnnnnnnnnnnnnnnnnnnnnnnnnnnnnnnnnnnnnnnnnnnnnnnnnnnnnnnnnnnnnnnnnnnnnnnnnnnnnnnnnnnnnnnnnnnnnnnnnnnnnnnnnnnnnnnnnnnnnnnnnnnnnnnnnnnnnnnnnnnnnnnnnnnnnnnnnnnnnnnnnnnnnnnnnnnnnnnnnnnnnnnnnnnnnnnnnnnnnnnnnnnnnnnnnnnnnnnnnnnnnnnnnnnnnnnnnnnnnnnnnnnnnnnnnnnnnnnnnnnnnnnnnnnnnnnnnnnnnnnnnnnnnnnnnnnnnnnnnnnnnnnnnnnnnnnnnnnnnnnnnnnnnnnnnnnnnnnnnnnnnnnnnnnnnnnnnnnnnnnnnnnnnnnnnnnnnnnnnnnnnnnnnnnnnnnnnnnnnnnnnnnnnnnnnnnnnnnnnnnnnnnnnnnnnnnnnnnnnnnnnnnnnnnnnnnnnnnnnnnnnnnnnnnnnnnnnnnnnnnnnnnnnnnnnnnnnnnnnnnnnnnnnnnnnnnnnnnnnnnnnnnnnnnnnnnnnnnnnnnnnnnnnnnnnnnnnnnnnnnnnnnnnnnnnnnnnnnnnnnnnnnnnnnnnnnnnnnnnnnnnnnnnnnnnnnttacaaaggctggttgaaaattgcggccagcgggagacttacctaaagtagtatggtgggcaacgtgacggtagcaattttcgtgtgtcggtagcatttctctataatagaatagtaagatatataatatagtacttactagtcctaatagatatatttataaagtataccctttatcttccttatataaaagaaattaatatacctaagttagtagatttattatataaacgtataatcctaatcttcggtatactagagaacctagtaagcgatagaggcagcctttttactagctagttttagttaaccttctactttctccttatagttaaacgctagttatctactatattctacccctaaactaatagatagactgaatattaaaactaggtactagagtacttcctataatcgtatattaactaggaataagataactaggtatactagctccctattgcagtatttatatataatataataacttacagtatgaccggaaagtcactgtataaagtattaataggatataatctatctatctaagatagcgttaaagagtaccctaaagagtactatatagatactatatagagggtataagaaatctaagaaataaggagctttataaaagagcgacttactaaggtaaaagagtcgataaagtactatatagataaatattatatagataaatcctttaaggttagtaattaggttnnnnnnnnnnnnnnnnnnnnnnnnnnnnnnnnnnnnnnnnnnnnnnnnnnnnnnnnnnnnnnnnnnnnnnnnnnnnnnnnnnnnnnnnnnnnnnnnnnnnnnnnnnnnnnnnnnnnnnnnnnnnnnnnnnnnnnnnnnnnnnnnnnnnnnnnnnnnnnnnnnnnnnnnnnnnnnnnnnnnnnnnnnnnnnnnnnnnnnnnnnnnnnnnnnnnnnnnnnnnnnnnnnnnnnnnnnnnnnnnnnnnnnnnnnnnnnnnnnnnnnnnnnnnnnnnnnnnnnnnnnnnnnnnnnnnnnnnnnnnnnnnnnnnnnnnngaatatatacctaaaatataagaagctttaattatagattaaaatttagtactatatttcctatacttatatataggtataggcagggtcgttatatctaactagacttaaatactaatagaatagtattaaaaacgcgatagagtagtaaaatagactctgtacttaaggtatcctaggaagtagggactaagtttatagggataaataaagtatcgctaggtatacctatattaggaaccgcactttcctctataatactagtagaagtattaaagaattccttagctttagagatttcccctatattctctacgattcctagggccctaataactttagtaactactataacctctatagcttctataatagtagcggcctttttagccttattagctgtataggttaagcgcttaacgttctgctcgataatatatacttagggtatatgagtatatataggcaatatattaagagcggtataggtagtagactaaacctcagaaggaagctatactattattaataataaattccttcctataataatatagttaaaaaacttatagggatataactatactttatagaagagtagtaagtatatttagtataatctataagggtcttatacttatagtctaagtagctttataactagaaaaagtactattagtaaggtaatagccttttaataagcttagagatttctaaatatagaggtagagttataggcttataacctattaaaagataatattatatttataaatatagagatttattctctttaaaagaagatagtttaggataataatatactattactattctataaatataattaatatataaatataaaaataaggctattttctataaaaaaaggatagatataatattaaaatttcttagtatactatataaaatataatactactaaatctaaagatatatctactatatttactaactaatagtaataccttaattagaataatattatcttaatagaagtataataaaaatttaatagaaatataaattagatatatttactaagtaagtaagataagggattaaagaaaagaagaagatattagaaataaacctaagtatatatatatataatatttccctttatcctaactatattctcttactaataaataattatttagttatacctttatatataggaaatacctaagtttataggctaactaagatactatatttattagagactatagctatctaatctcttagtatagttatataactatactattaccttattatatatactataccctttattatactataccctatattttagagtattaatattagatacctttccctatatacctttttacctttattataaggtttttagatatataggttttaatagactaagctactcccttattttcnnnnnnnnnnnnnnnnnnnnnnnnnnnnnnnnnnnnnnnnnnnnnnnnnnnnnnnnnnnnnnnnnnnnnnnnnnnnnnnnnnnnnnnnnnnnnnnnnnnnnnnnnnnnnnnnnnnnnnnnnnnnnnnnnnnnnnnnnnnnnnnnnnnnnnnnnnnnnnncttgccgcaggaacgactatgccctcgtaccttcccaaaagaacgaacgagaattaagcgagataaacgcaagagtataagaagggaagaacacgcacttagatagtttctctttttcctttcttccttgtacttagaatttggttggaattgcactcttttcctttgaattgaattggctcgtaatataattctaagtactaaaccaactcaacctttagactgtacagctgtataagcggtcattacgaccagttctagcttagtctaaccttttaaaaaaaaatttttttcccttttttcgattataaatatagctcccttaacgagaagctcggtgagctgtggaaagcgacctcttgaagccctatataaagaggatctcgactagctaggcctagctaccctaactcctagcgcctcgacctcgaaccctactataatagaaagtattgagtataatgagataacgaaccttaaagaagaaaatttgatatataatatactctaaggaaccttaaaggaagaacagtttataaccctcgctagttaatataaggacactgtaaaagaaaactaaaaactgattatagaaattgctactctctatactaaggaagcagagacaataaccttaatctagaacttgactcttaaatgcgatgaggtaattgcttacctaaaccttatactataagaaagagactgttatacctactatctcttaaataatgaacctacgacttaaggaacccccttatactctggtataccgattataggagttagaaaaaaccactaagatacctaatgtacctatccttaaggatagaaaggaggtatgattcgaaacttaggaaataattatttagtagaaacttaaggctaatactaactattaccctctccctatctactaaaagatctatatttagagctactataaaggtaaggcctaactctatattatactataaataagtgtagccttaagtaacctataccttaatatttagagccgctgtaaaggtaaggcctaactctatattatactattataaggtagcagacggcaaacgggcttccagatatggccgcaactgcggccgttttaggccgtagatttgccaagcttcgcgccacgcactacttcctctgaccacggccacgcaatctccgcttggcgcagcaacagacacccctcagttttctagcgttccctgagggtgtagcgcctgcatctttggtctccacacttggtactcaggctgcggttttcattcaggtcaacgctgtgtccctcttttctcccaggagccttttccaccatgacacggaaacgctgcgctcagtggaagggctcattatattggggccttcccctgggggtcttgtcggaattttgatatttaatactcaatctgaaagagtttgcctaccttcctatttctttcctggctttccttcatcaagagtaattaccctcaactcctcactggacgattgctcgttcccacagcatggctcgttcccggcgaaaggccaactcatatccgtatgacgatggccatctcagctccgacggctccgacagctcagatgatactggcgatggtcaatatgacacggatcctacagagcctgattgcgaagacgatcagctgaaggatgccagcgatgttgcgcagctctttgcagacaacgagcatttgccagaatactatgtgcagcaacttgagcagtttgacgagtccgtttacacccaggaggattacagcaaaggcactgtatctctccttgaccaagttcatacaagatggaatcagtgagttccagcccttcgttgggaagtctagtacatctgatctttcaatacactatgactaattaaacgcgtcttaggttctgtgcatgtgttcaaaaagaccctcagcaagagttttcgaagttatccgttggtattttgtatacctttttggattgggtattgaatttgcgacgaggtaaaaatggaagacgactacccggaatcaagcggaagagctcgctggaaactttttggaaggtttttcggcttgtttttgaaagagccacatctggcaagattgaaaatcgcatgaatcgacagatgcgccgtgtaagaatccctcttttgccgaatcaaaacaccgttgtccttccaaagacgctttaagtccgcaccgtatagttggcattaaccactcttctaggtcatccgaaaattatcccgaaatcataagttatctcgtaagggccgtgaaaagtccaccatgtacgtggaggacttgacaatggtcgtcgagaccgcgatcagtactacaaaaaagaaatttggacatgggaggcatcgtatcgagctctgcctcttcttgcaacttgctggcctcactgcaaatcgtcctcaggccatattgaatttgatgtaccgtcatattcgagtcagcctgctccgagatccgcaaggtggcccacatagaatcgtgattgagttcaccttcgagttcacaaaagggttccttggcacgaaagacgagtgagtggatatatcaaggacttactatggtcttcagatagttaaccagcatgcaggaacacctatatccttcctgagatcatttttgacccatcgcttgttctcagtccacatgtctctttgctgggcttgctctttggggatcgtgctttcaaacgggtcgagggacaggaggttttgttctctgcagatcagcttcctcgtctaaatattccggcagattgtaatgaacttccattactgctcgatccgtctttagacgatgttccagtattccgacaaacagaacggtcattgcaaggaatgagaatctcccccgacaagcctctaccatactctacactgctcccgtgggttaaaaccattggagtcatcactggatttcgacaagttgctcgcccctacagcttgcgatatggcgctgccaaagcgttggataatagcggtaactcaccttgcatatttatatatcgtgcgcattcacaacttgctaatcatggcttcttttaatttaggttccgtgagcgactctcttcgtaatttgattatgcaccatgccgatactcgcacctttctaaagtactaccttgatagaaggattgataaaaacctacctgccttaattcgcggtctcaatccagacgaggatatcatgcatgcagcctgccggatgagcaggaccatcgatccaaaccggccgcaagacctgacaactgtgcaatcgtcctccgtcaaccaaaggccggaaatcctagcattggtccagcggcgtgacgagcttcgtcaaaaacttggtcgacccctctcgcggcatcgaggcactgtcaaacatgacgcttatagaaagctgaatcaagaaatcaacggcgcgagagaacgggccagaaatgcgttgctatcacagattcaggaaaaatatgaccaagagcaacctatgctagaagttcaacgacagttgtccgaggctacgcttgaaaaagaggtcaaaaccaaactggaacgatcagaggagcttcctctacctcaaaagcgtctgatcgaatgcctattgagtttgccacctccaacgttggaacaagagatgcgtcggcgaactgaagcaatcgatgctgtcgctgcttactgtcaatttgaggaaggggaaacgtgccgtctgccgcgaaacaaacgttttgagaatgatatgatcgagctagataatcctggcaataacccctcagaagatgaagcgtccgagaacatgtctcaaccagattctcctcttgaggctgctttccgatctatcatgaaggatcaccgacctctgttttgctttatttgtctaggacaaaaaaagctggatatgacgaagcgtgtgcagcaatttgcatcgcatggtgatgtttcgaagcatatcaagcgaaagcatcttcaaaaaattgcagctggcaccgtaatctcgtgcaatatatgtgatcaaaaatttgataaagttatgcattttcagcgccatgcaatcgattttcactcgactgtgacggggtcagtggcctccaatcatcaatgaatgacttctttccttggctttgtatgaaccaaaattgaatctagtgtctatgtcatatgcaagctatagctgtaaagttcaaggattggaggtctattggtagtaagcatcagcatgaacgaaaaagctgccttgggaacaaaaggaggcttgagtgctatctagctaattgtaattgcattagacaacatagcctcaatgacgtggcatttgagtctgtgatctgatagcgtgtcataaacataattagaatagatagttaagcgttgtatcttagcattaagggcagataactagaaaacaaaaggttcatacttcaccagaaagccctcgagtctcaatcatactctgatagagagcatgtctaagttctgcgctcaaaaacgtaagtgcacgctgcgatgacttcggaattttcacgtaattgaccaagcagttgaatttgttgggcttgaatggcttaagcttgagattgttttatggctatatctctacgttccacaactgtcgaatgcatccattttcaaggtaagtcctcacttaaatctgaaaaccaacggatcttaaccgcggcataaaagatccgtaagcatctgcttcggaacgagctccagtatgacgagcttcttttggcaatagagccgacaccacattttgatagctcgtcagaatctgccgcaactctcttctttcacaatatcggcacaaaggtcatccaaggttacctagagccatctctatctatggtgcccattcgggttcttctctccgggcatctagacaagcgtcgagaagggatcgtaaacctcaccaggagtgtgaaagaatgctcaaatagggaaagtgacaatctaacgctcgcccacttccaggaacatacaccatacaaaccatggaaccaagaacagcaattacgcaccaaggatgaaatgttccatcaaagttactcgcaccttgctataaagcagatttatgaggatcataaatatacaagtgcactgaaagagataggagattccgagtgctgttcaccggaatacagtttgattcgactggggtttgatcctccaaggtggtgtgctgtggctcaatatagaggagtcaaatcatctgcagaaggaagttctaaaagagcagcaaaacactcagcctccaaatcactttggctgcaaatggggggtgagccgatcgcttagttaaaatatctatacgacaaacccttaaaattgctttggttcttgggctgcctaggtctactggggtttgaaggaagaactgcccttgaagatattcattcaatcgctaatttgactggcttttaccttttccttattgtatctcggaacaaggcaaatgaagtcctgaccgtgagaagaattcacagagatccagagagattgctcaagatagagtagtttagttcgggtcgcttctgcatcagagctgcgaagcgggggcaccgcacaaggagtctcgatcgcgatgcggcataatcaaccaccaatgtgtataaatcatcagccttatctagtccactgatcaagaacaaaagcttgactacaccttcaattcgacaagaatccaagatcatgtgctcaagaacatgaactagcttccacaaagtcaaacggtcaagtgtgtccatgccgtgcttttttgcgaatatatgcagtcgtgcatgtgtaagtaatgcatcaatgttttggcaaatgttttctgtttccctgcaaattggctggatgggtgtttgcgggaagttttctgccagatggtccaaaagctgctgagtactcgcacgggtccgaaaatagttattcttgagcactagaaccttctcgaatgcgacttgagttctatcttcacaagctatatgagccgagtcatcctccaagactgaaatttgatagtccccgacataaagatattgaagtacatagctgaaaatatcctctatgtcatcatggaatccaatggcgtatttagaaaggtcaagtggagagcaaacgcgtgcgatacgtttattgaggacgctggcatgggcactaaattctttttcatttggtcccactttgaaatacacgatcggggaatcaaggtcactaaggaaacatcagcgcaatgcatttcaacatgggaggtgggggctatgagaactcaccctggatgcggtagaagcatgattgatggggaagaaggtcggcaatcgaaatcggggaaaatttgtggcttttaaatagctggccagccctcaatgaggagggactgaccctcagtgagggttggcaattgtaaaattcttgctggcctcagtgaggacaaacgacggaaaggagtgtttcaatgctttaccagaaacgggcttctgaggtgtctgtggttacttgcaaagtactgtgaaatacagtggtattcgaaatctttttacctgcaatctctctaaacctgatgacgaatatcactgtaagtcctcttgacaagagccagatacttcagctgcattgtgcgctccatgatggtaatttcactcgaatatgacagagcttctgattgtcgatacatatcacaatgatctttgggacatgacggtgatatctgtagcttttctcattggtttttgtcgaggtaaatgtgtacaattatattgcttattgggagaaacgaggagcaagccagtttacaatcggacaagcatctaagcttcctagtaaaaaagactgattacagggcttgggggcccagagacagtgaaggctctgtggtactattctgatggcccgagaggatcgaagcccctgttcagcatatgtttgttgtcagaaggccaccaaggctgttagattagagactcaaatctcaggcgattataagaaacatacttgaaggctgatgacatgtaacctgaaatgaaagtctgctcatataagactacgtactagggctcggtgacaccgacccgagggcggtggacacagatccagagacccagtagattccaagaccgcggtctcaagacctaccaggccattagaatgccaacctatatcccctacaatttcacgacccgctaagccataagtctcagagcttaatacacctagtgactcaagactagctcgaaacctgactacgttattctatcgtcagaatcagttgccgcccttcgctgagcgtccgttttcatcatctcggccaccgcagccactttggctcgtgtcactacaagatcttgttgtaggctcatgaggacggtattcgatccatcatccatcgcggctcggacacattgagcagcgctgacaagtcgtaggttcttgttgtagaagcgtgcatgtttgttgtccttgcgggcatacttgtgagctatacgatgtgcttccgatggatcatttgggttgaccggcacttggtccgtcacgtgccatcccccattctcataagctttgaaagtaatcgtgattgcgttgggtggagggttccgacgtgggcggagcgcttccggcagaagtggaactgtgaactcgcttatgttttggcctgaggcgggagcctcttgcgagtcattcttattttcgcgcagcttctttttgttcgccttttgaacatgctctttgggttcctgaggcttaggaacttgtgatgccatatcatgatgggttgtttggccatctgcatgttctccttggttgagcccgccatctcccgtggcccctgctgaattttgaagcgctgcgggtcgaggtgggccagtatattcacctatgatcggacctgaggccgaaggctcaagcaaatcgcccagaaactcgcgaggtcccatgttgtccgtgccctgttcagggtccgaggatctctggtgaccaaaaggcgttaaactcgtggcctgaccgaggatgggcgactcagcctgctcttgccggtcgatttcatcctctcccacaaccattgctgcatccagcccaattaagtcaatttgagtaatggcctttgctgctcgggtgcttcgtgccactcgaccttgccgaacaatcgggtcaggatcctgagttgtggctggcgaattttcattcgatatgcgagatgcggataatgcgtccacagccggtcccacaccagggctgggaagctctaatgaagcggttggctcattcgtcgacggagaagactgcttttctgatctttttccactagtaagcgcccgtgtctctgcttcctgctcaagctcctgaagggcttgatgtattgcatcttgcgcactctcattttcctcggttatttgattcaggctttcgctttccgcctcgacagggctcggcgtgggttgtagatctatttcagaagaacttcctcttgccaaccggtcttgcatcttagcagacacgacagactccacatatgccattgagacgttctcgccgcttcgtgaagagtcttgggaatattgcgaggcggtattttcgttcatatctgtttgtcgctccgcagtatcatgtccatttagatttttacttgatggttcgtgtctagtgtcttccaagtagcgccttgtgccactgccttgaggcagcacttgctcgtcttgcttggaatttggcaatatctctgggtcctcctcaacgtctcttctggtatcgtggagtaaatcgttctgtatcgctaaatgatcatccccaccaatgcgactctcagtataggatcctgccatggaaatttcttcactaccaggaatgacatgagcgaggtcaacgtcattcatatccatatcatgatcaacagtggtggagtcaactgaatcagccggcacggctggatgcaagtcggcaatttcctgtcgtcggtctcggtgtaaatggcttccagcctcctgccttcgatggtgtagttctcggcggtgttctcgacgtgattgtctttgtggagctgatcctgtagccgagaccgctcgtggggtgcttggcaggtcattgactggtacaaacagaggggatctagaaacttccgtttgcagcagctcaggcgaagctataccatggtcttggcgttgcgcccatgtcaaaggcttgtcgaagaaagcaaaatacacgctctgtctgacaaaaaaggaggagataatctgctgccctgttgcttctttggaatgcactttgtctaggaaaaggtgaggtcgatctatcggctgcacatgctgcaatgggggaccacaacgaagggcaagcgttggtgcccgaccaagaacaagctctggagagggcgtagactcgtgagcgactgcggtaccaaaacactccactaatcggtcaatcagtgaatcgaatgtgatagggtcatatcgatagctacccggtttccgggccttgagtagagcttcgcgagcaattcgtcggtcgggggaacagctcaacattttagtgatgggcaaagagtcgaatcccaatttctgtgcgagcgtagccatgttgtggagaactacttcatccgctcttccgcggatggccttggcaatgactttcttgctggtagcctccttagccatttccgggtaatgacgcatagcaaataaccagatttgtcgataggcgagttcaaaagaatccatacttgggcctgtgtggttccgaaagcgcgcctccgatgtctgcacaagacatgtacccctggtcatgtcagggttataaacatgcttcaaggcggctcgcaccgttggctcgttcttgcttataacagcaagttgccgcacaccggttgcgcacgcctcgagatatgcagtatcgcggaaaaaggtgtgaattgaagggatgatcccatcataagtggacattcgattccatattccagatcgttcagtctcaccaaactgggggaagacttcgccgctgagtatatagccttttacttctctcgcatccgcaaaacatgccaccggggctctgagctgaagcttttccacggtatgaatgtcgattttggccatttgatgtcgatcactatccactatagtcgaccagaatctttcaacatgttttaaataatggataaattccttcgtcgttagcaagaattaggtgaaagctgtgggaggcgatgataactaacttcatcgcacttcaatgctagtacacgattgagagagccaatactcaggccattccacagacctggaatgggcaatagggcatcgaaggcagcgcaaatgtcgacgttgtcaggtgacatcagttgtcgcaaacgcttagctttattttctgaaagccgcgcccaccaccgcttctgaaacggtgcattatgctcgttttggtattgccgaattttgcggtatatatttccatcagtgggtgttttctcgtttgcatattcatcgactagtgtatttcgtaactcagtgctaatgtctacataaagtcagaccgagagatttaaagaggaaggctgtaaagtagaagttgtgccaaataaaaaaaatctcaccatctagatagaggtccaccgtccaccattgctcactaggagcaaggacttctgctgctgcacgcaggcggtgttgaccatgaaggcattggatttggctagaggggaaagacaggaacgggtatttatcaggcagactagttagcaattcctccgcggttatttgtgcctcccgacgggcgtgcttcaagtgtcggcgggttacaacagctgtcacatgatgttgtacatccagtcgattgcagccatccttccgaaagacttcgcataatctctccacgttcttttggtccagttgtcgagccacgcctgggtgacatgttatctggctcagagttatcttggcagttccttggtacttcaggcgccgctcagttgtcagttgtagctccgcatccgtgaacatggattgttccatctcttaatccctcgataagtcttcgtcaaaacgtggattgagaaccggccaccagagcgcttttaagttcttaggttgttaaatggccattggaaatggcagggctcgctgcggatggcctcgttgtggatggaagctcgaaggtgccctacaaaaacagtgctactgctgtccccacggtatccaatttcttttcctcaagtatcttttagagactatattcaaacatggaaagagatcaagacaagcggtctactcggtttgatatgctgcaagcccaggcgcatttctcttcgtcggtcacggcagcagaaacgcagcctcataatcctactaaccagccaggccatgctcaaagcccaatcaaataccaaaagagtcctgcagctcagaaagatcgttctcgcaagactctggaaggtccgccaaaaacactggagcttcccaccaatgtcagtaccggagggttggcgaagactctacttatacgaacttgttccccgtgggagacctataaacccatatttacatgtgatcttgccggtatagtatcaattagtgaacaccgtcaccggggctccaaagtagtcgccatacgaagttcgtcaagaatggatagagaggatctactccacaaatatacgcgcttcgatcacatcaacataatttctgccagtgaatgtttcaaggacaatggcgtaaaccattatattgtcgatgacctaccaatcaccttagagcacctggtcgccagcgatgcctatcccagtgaggttcagctggcttccattctcaaacaagtgagtcttaatactgtctttttccaaaggacggtcttgctaatatgagaaaggtcatagacggattgtcttatctgattgaatgcggctatgagcattcgtctttaaagtgctccactacactaatgagtctagacggagtggtgaaaattggtattttacttgacacttcagaatggctggtgaaagactgactgtcgtgatagctagcttggaacaaactgtgccctacacgtcggaacgatcccaatctttgtccctgaaaagcttgggatctctaacaatggaacttatgcagaagtatgtgaaagagaatgtggggatagatgatccagctcggtggcccgtcgattcgaatgcggttgactttctatcgtcgacaacgtcagcaaggtctgtgaaggagcttacaaaggtaagcagtggcaatacccttactgaatcataaacttacagccttcagcatccactcattgcagcatcctgttccaccggcagcttggttgggctagcgcgacttgccattgtctctgcatgcactttttattcctacagagagtgaattttggagatttatttgatcgtatgttctcatttgatgatatttgaatctaattctcttttattcttgtacatataagaaaagaattgtttgatcgacaggtaaccgataaccgtttacatgtaccttgacctgcatgatcatatgatgatttgtagaccatattatcgacttaaacggccttgatctagtcgcaatattatagctcggcggcctgattgatggaaagaaatttctcgagccttaagccaggctcgatgagaaacaacgaaagatcgctcattttgaccaattgacctagacatgagtggtatgtactactaaccagtagagatacattatattcacttccgaattgactcggattcctcggtatctgtaggcatccacttgcatacctccttttgataattcatccctatttgacattcggtggattcactgtaatatgtaccatttgatttccaattatttgcctctttcatgcttattatagaataagatgacttataattgaagctttggctcttcggctatgagaattagttgtaatttccactcaattccggttgtgtccttcgggtagtcggcagtatcggtgttcattgatcggcgtttatcttcggcctctgagaatactaaaggcacccgattcggcgagcatcgtcatgaaagtgatttcccggccggtagggtgaattcaattccttgatgattaggaatgggcctttgcaatccaaacatgaatcaggatggcgtcgagtcgttcgcacattttatgcccacgtgagtgactatctagcatgataaggattttccgtaagtcttcctactaactagcagtcgaggtggttctccataaatatgggaacaggagttgtttccattttactcaatacaccgccatacaatgggaaatggctatattacctatgtataatcgtatctgccctgaacgtggcatatcttgtcatgttcttagccatcagtttgctgcgctacaccctatatcccgagatggcccgtattgagccaagaccaatgagtgtacagagaatttggaccctgccctgggaactttgtgccattatggatcagagcctcgttcacccataatctaggtgcccaggactgagaagtacagtgtgacatagccaattcaaggcaaaggttttgtttccaattagtgagactaacttgaattgtccctcgtcttattgtttagtctcacgttttagccaacaatccgtgcctatggaatatgaaacacagtgctaaagtagaccactcgctgtgaccagagttgcacaacaaatatcttagcagaagttgtcatgttttccaatagcctccaacttgacattcatccgtgtcgccctttgagaatagtctttcagtgacttgttatagaataccaggtctcgatagctttggacccctgtctcggtttgtttcctaccggaggcatcaatttccacatcatcgtaacctttgcctctgaagttgggggagctcctaatggggcggatggctagaggtagagaactgctcatccaggtttgtatgtggacgcgatgtgtgctccatgcactacatagacaggacagagctcccagaagccagaccgcgactggaagcacgagccatctccaatggatcgcaacatatgtgatagtaaccatggttctccctgcggtagtgcctctggtgaattgactgcttgacaatggctcataactgacattgccggtaaatgctccatcacgaattgttttcgacatagcagaggcaacattcttgatagcgcaggtcagttgatcattttctgggcaatttgagtttgtgagatttttgtaaaatatggcttccagtgtgtctgttgctgcataggttcccacgccgtcacctgatctttcgaaagaaaaatggtcagagccagcaacaacgtagccattgaagaggtctgtcacgaagctctcaatggctctcattgcctcccaaccaataccgaagatttgagtcccattcattgcaaagttttcctgcaagtcgggtttcaacgtcaaagcgtagtcaccatccaaagttctgttgatagctgtccacttctccaatctttcttcctggtagactcccatattgaccgatgctttgaagctttggacaagtggctgtaaaacacattcagtggcaatgaacagggtgttgttccctatttctgttgagataccaccaccttcggtaggattttgattggagccggctgcaaagatatactgtatgaccgggaatatgctgctctgatgaacagtattcgagcttgcaagcactgtccttacaacgattggctgagcagcgccaccatctggtaagtaccataatgtaacgccgcttttaagcgatagagtgcaattgggatatggtaccccgaagtcactcgatgcgtcttttgactcaaagcaggtacttttcaattgcgaagtaatattggagcacgatgcacctatctccaagctcgccattgcatcccaggtgcagtttcctgtgggacaagtatgttgcggctttgaccagggcaatgtaggatctagattaaaaagagcactatagacgtttgccttcaggataggatcaacgtagaaggctagtatcttctgtcagcaccttgcaagatattgaagaagtctgaacttgaaacgtactgtcaccaccaagtaagggcccaaccgtattatatccccgtgtactagccagcagtgacacctgggaaggatcttcccggtaatgcggaacataatgaactaagttctggacaaatgggtcaaagccaatagagaatatcattgccaagctaccaattgcggcgaggtggctagaggcaaattgtcagcgtaaaccgattgcatcaggtagctgttgaataacatagaacaatattgctggcacataccgtcctttcactagccatagcaacgctacacttccacttaatcctctgctagctaggtcaaaggtatccagatcagacaaagttcggctctgcctggaaaaccagacccatttcatttgacctaggccgttgctgacagcgaatagcaagcaagccttggatagagtgctgagccaggcaacaagagaattcagcgatatatatttccagctcggttgttgccgcccgttgtactttctaagtacagtaacaattgaaatgatcaaagctgccgacacaaagattccagcagcttcccaggcccagtattcgagaaatgcgagagcagaccgcagctgaccttggttatgcttggtgggatgtagctcgtcctggtcgtcttcctgagcttcgaatatggcttgagcttcagttattggctctacctcagatttgaccggagccattggagaagaatcaggcctcattgggaggtaaagcaagacgtatccgcttcttccctgttgtctgttctccgttggttgttgaatgttgatattcacaaatttgagtctctgccttcattaaaaataaagaacggggttattgtaggatacccataataggggtggttgagaaaaatggggccaaaatggaggctaaaagggtgtgctatcgaacttagtaagcattaacccaagcgcagaacgttccgtctccggaggaaatatctctcaggtatccaacggaactaatctaaggggtgtcatgatctaattggatggctcaccccggctgctttggcttgtgaccaacaatcagccgtggctgatagggcacctgcattagcttgacatgcagtgcgacggtctcggtatttcgcatcacaaaagtaccaaacagaatggctagcttaatacgttaccatcctgtcgagacgatatgaatggagtgataggcatataaccctttaaataatccaccgtaggccgaaaacctcggctgggtttagtaagaggattcagttttcgacgtgaggccttaacacacaatattgtttcgtgatgaaaggccgcagaagcatagctatttcgattttggaatatatcgtgaactcaatcatgaattgatggtcattgtagcgataatctgtggataagccattctgggtgctaatgatccttaatcgaacagatggctcacgcggagcggaattggacttgtaataacttgccgcattccggaaagtacttgcatgtttagttgcattagtttcggagctagatcccatttagtccagtcccgatataagcaccatagaggcccataagcctcatgctgttcaccagctgagcgtacaggatggatcgaaatcagtttcaccatttacacacagactcgttctcaaaccctattccaaaacacgctaatctttatctgacttagctttgcttcgaaattcgaaatgtattgaaagtatagcacgtgataaaaggttttataaattacatgaaatggccttgccaaagatacttccgcctcgcagttccctccccccccctccccggttgaaccacttccgtcatccttgccattagcctcttgcaagggcagtttgtcacgataaaaagctctggcttgcacttgaattgcattgagtcaacctaccacacagaaatattctaggaaattacagcacatccagaaattgctgaaaaaaattcgttatatctaacaggcttcagaacagcgttcgtcagccaggagaatatacgaggctaaatctacctgattgtcccagatgcagtgaatttccccgtgaaatttgaaaacaattaaagaaggtgtggacactagatgcactgtgtttcaggttaggcagggtttactcactttgccaattataatattgttgagattagcagggctcttccgaatgtattagtcaatattatgtgacagctgaactcatcatgaacaacagtatcaattcaatgagaccgtccaaattgcagactgctgagaaacacgctccaaaacagagaaagcattgaaatcatgatggaaagcgggatagatgggttttgtaagtctgtgccaagtcgctggggtacaatccatgccaagaagaatactagcagtggtgaaacacagacgaaattgtagaaaatgatccaacgtaggcttatgatttcgcgcgcatagatcccccagaaatcttctcgcttgttgcccgcttcttcgagttcggttttcttctttgggaggaacttcaggatgtcagaggaatgtgctcccagccttctacattcatggtgcaagtgaagtagtggtcgtggtttatgacaggcgtagaaacgtgttgtgaattcgtgctctgagattggcggaatgtcgtccatcggtcttggttgatactcgtaatcggtattcgcatggtcagggaatgaatctttgattctgagcgcgaactcgtggtcatcgaacttgacaaactgcagattttatacttagaacccatcctgaagtacaaaataaaaacacttactttgtaaaagtcacaatgagagtacctccagacgctaaaccagcctcgtaagacacctcggaggcggaaatactccattttcatggtgctaaagaaggtatgacaggtcatattgctaacgcatatttgtgcaagtctataatctccacctttcttagcgagaaagaggacgcggtgcttagtggtgctcatatcggccttgagtcctgagggtggacaatgaagtgaagagttggagggtgcaccgctcggctgctggcctccatgatcttgacaggagatctgactggagattagactagtgttcagggcgctgcgagggttcgagtcaggtatagtatgtgcctctggaggaggctgcgtaatttgagtcgctaaggtattcacgggaaggctcctaattatggactggaggcgtttgacaagggtgtttggtacctccgcctatcgctcttcaccacatacctagataacgaattagggctggatctatgctgtgtaaagttgtctatagtttataaactcacacactcccaccgtaaccgtgtctctgattctgccagcggtctcagacagtgaggtaatggccaccaatcccaaggctctccagtccagcgctcaattaaatactgacagtggctcatgaacctgaaaaatcgagagctattttcgtcacgttcaaattgaatcccgcgggggctcacgtgctgcaattctgtagcaagattccgtagtttataccgagcagcatcggcatggttcttatgttctggatttgaccacctgctcaccagatcccgaaacctggagttcagcgagggttcaataaaatccacgagccgacgataaaggatttggtaggcggtactttccaaaataaaatgcttcatttgatccaaattttgcaaatttccctcatacgggtcatcctcaccagcttcctctgccacagagtcttggtcactttcctcatcatcaggatcaagtacctggattacttcacttgtttgaggagcaggtccgcttctgtgtagactttgaagataagactccacttttctctcgtctgctaggcgtttttcaacagatgttattccattttctgtcttgaaatcgtgaggtttgatgtttggctgatcgtcgataggtaccatagcaaagagctcgcgggtgatcatggccgaatatgagcttatgaatctccttaggtcttggtgcgattcgctgagaatctctgccttgaggttattcgcaaagtgtttcaataatctcctaaaattgtttcgcatcctctcaaatccgaccgagtcttttgatacgccgatcaaaagtaaggaaaagatgactccatcttcattcaacaagtttgcaaactcttggatcaacagcgaattcatctcttctcttgcggagtccaatgatctggtgctaggcatagacactggagcagaaaacactgagtcattctcaatggaggaatcggagtccaccgaacccacatgtctattgcgtacggcagcctctgaggagaagcctagagtatgaagatcctctagccctggcgtctgcctgcgagtctccaaaacctgcacctcaagccgctccgcctctacccaccggccctggttccggtacgtcgatgccagattggccatgcctgtcagcgtatcaggatggtccgcgccgagcttcatcttgcgagtctccaaaacctgcacctcgagccgctccgcctcttcacaccggccctggttccggtacgtcaatgccagattggccatgcctgtcagcgtatcaagatgatccgtgccaagcttcatcttgcgagtctccaaaacctgcacctcgagccgctccgcctcctcccaccgcccctcaagtcggtatgctattgccaacatggctaagctatcaagagcctcttcatgctctggacctagtaaaatcactctctgttctcttgattttgctgccatatcccttgtatttgcgacgctgccgctttgcgacgcataccatgcacctctataaagtagtgtggcccatttgaatagagagtctcgtgatttcggtcgttgggacatagctgaacgaacgtgaggaaagagcgaccggcatttcccccaattttcgtatggactaatagggaactcctggtacaaattgcttataaacctctccctccactggtctatttctccataggatttcaaccacgcgcgcgtagttaattgcactagcctgctcatcctgaatgaagtgctatttttgctgatagatataaatgaataatctctcagcattctgatatcatcttcaaattcagagtcagcatcatattcagatatcccgccatcgctagggtcgtcagggagctctggatcagagttatagctagccttaggttgatgccggataaggttctctggtatcccttgccgatcaaaaaagctcataagagaaagcaatcccgctgcagatggcttgctttggcgtatataatcgattgataattgccacgtgattagaatcgagtttttggcttcccaatctcgggaggagtgatctgcctcttgtatcaataacgctgttgctttgcggtcactgccctggaagtcttttaggtattttgataccgaacagcgaggtgcccgattttgtatatagctagcggcctgcacaatcgctaacggcatgagctccaacgcgttcactaactgttgaccttcttggctttcatctggctgatcgaggtttttttggagaagttctagcgcttcagactgttccataggtttaacctcgataaggtccttatggtcgactatcttcaacgccacctctttggtccgactcgtgataatcacagatccatttcggcttttaggaatatattcccatagtggttttgtcaaggtgtctgttcggctgtttttctgatcttcattctttgccactgaaaatgggcaaagaagttgattgtcatcgacattatcaaggattaatagccattttcctctcttgtcatccccgagccagttctcaaccagtccgaatatattaactttaggatcttgacaacctagaactttgacctggtttgcgatatccctgaaaccttgctcgaagcgggcttcgttgctcgcatgaacccaaaagacccatgttgctggcgactcgaaccgaacccggtagccgtattcgatggcaagttgcgatttccttgtcgttgtaagcaatgagtaataaatcacatactagtcgttttccactcacccgacacctccaaggccaaccagcgcgattctcgaccctggcaacgagcttttctcgtggatgcgatgaagtaggatgtcgcgactgacaaaattcggatcgcgagggaaagggatagttgatagagggctgggtggagtttccggtcgccctagattggatacagcgattagtcacagtcgcgagcttgtcccgctcccctgacttacctagaggccaatggaggaccgagtcgttgttatctccgatctggagtcctttgtttttgccacggaatgatatcgatgccatagtcgaataaacgtgccttgattacgggataaagttcatgagaaggcttttagtctgctactcagctgaaggagtggtaccttaggttcgtcatcaggtgactctcgcggcgctaagagacgggaattgattggcagcaacccacgtagaacattcagtcgatcctgactagggtgaaattagcaccttccaggaacttgctcggcccgggcccgaacacccagatcaagtgcagcactcatcccgtcgcgtttttccccgttttaacggcacgaataaaaaaatacgagatcacgaacgaacgcgtgattgttcaacctgcaatcatattcatgaggtccgtagcttcgagatggccccccgagctcccaggaatctgtggaattgtcaagtcacgtgcatttcctaaaacctagcacccccggactttttacccaaaatcatttcatctgctcactgagcagaggggtgagcaaggggaaaagatggagtcgccccccactctttcttagtggccgaccactgccctgccaacgctctaccctttctactagacgcccggaagaccatacaaggctaatacggaagccgtttttgctgtaatttacaattgtacttgaatactgccaagaaacggagtcaggggtaaagcgaccataataggtatagcttttttcgaaaaagggtttgagatagaatctgtgtataagtggtgagactgatttcgatccatcctgtatcggcatctcaatgcttgcttgcaagctaggggaatccctgccatagccagaaagtggatatcgagcttcatgagcaaccgccacgccagcataggatttgacgacttccgtaccgaattagcactgttggagaacgcgggattggcacaagggtcccccctctctcctatcctctttgcattcttcaacgccgacctagtagaccaatcggtcacccttcacggtggcgcctcggcattcatcgacgactattttcgctggagagtaggccgctcagcggaggagaatttggccaagatacagtccgaggacatcccccggaccgaagcatgggcgcggaggactgggtcctgcttcgcagcccagaagaccgagctcatccacctaaccagaaagaaaaccgaacacctgcatggtcaaatagtcgtaaacgggacggcagtcacaccctcccccacagccaagttactgggtgtcactttcgaccaggagttgcggtggaaggagcacgtgcaacaactgattaagcgtgcaaccaaagtcaccgtcgctttaggcgggctacgacacctgcgcccagaacagatgcgacagctctaccaggcatgcgttaccccagtcgtggattatgcatcaaccgtgtggcacgatccactaagagacaaaacccaccttcgacacctcaacacagtacagagaacctcactggtccgcatcctgtcggcattcagaatttgtgagatgtaggggccgatcgacgttcagcccatccgctgcctgatgagttgcacgtgagtacgaaggtattggtatttcctaataactagaagagggcaataccatagttcactattacgatacatttcaatatactgaaacgcactaaatcaaatatagattagcgcgctacagaatagggtctaagaaggaatctttgagcgctaattttcagaaacaaggtatacagtctgatataaaaacttgaaacaagtaaatcattaatgttttgatgaagtgcaactcaacaacggttttggcaaaatcgttttgcgatgaaggaacaatattacatgtaaatgtttctacaatttcaatgattgaaaaaagaaaccgccgtctgtgacacgagcgaatccatctccacgtcttcccaaactttggaggcctcttgagaagacaaactcgtctcatcctgctcatttactcgtatcagtgtagcttggccgagaaggccgcttttctcttcattcacagccttgaccaggtcatcaggcaattgcccaaacatcattgccttcgtgatatcctccaatgatctgaagaaagaaaggcatccggggcgagcagctttaatatacgttattaatgcgttcatttggctcatggtaaacttctcatttctgctgtaatatcaggtggtatttagtattgagaagggctagcactgtgtcatgatcactcacattaccatagcgagctgttcactgggtacaagtagtactccaagaccaatgccactcgcaagcgtccaccatcgtttgccccagcgatgaaactcattcaactttgctcttccagaatcaaggttttctttgctgaagctttgtattttaatcccatgtaaggctgccaggatcttatcgttggccattgttgtaaatcggtcgtctccagaccgaggttcgtagccaccgaggtcttcattagccctcatttcgcgggcgatttcaagatagatcaagtaaaaacaaacgagtgccatgcggtgttccaagccatacttaagaagtctcttcgactggagtagctcgaaatatttcgcggcagctggcgcactcttttctagaggcggaaatccgaggacgtgcttatcactggacaaatttttgcgccattcctttagttgaggttgtaatagtgcgtgataatctttcacaatcatgtaatccgcaactgtttgaacctcccgcgcttgtttggtgacgttcttctcttttttcttatcaaagcagttttggagcaaaacaaaaattgtttcatttatattgtcttctcgcgactctggctcttttcgtctttttatttttccttgcgaggttgattgttttcgggtccgcttttttggcgtaatagatggcgttgaacccttgtcgcagggtgtgctgcatttagaaataggtgtcgcgtaggtgccgataggtgattgagcagttagtaggatagtggcatttccggttgagctttccacgtgcccttcgttataaagttcctcatggctactggtctccggtgtgaaaccctgaggggggcttcgagcgttctctagtagattcaacgatggttgaaaagccatgtgcatctcttttcggccacccccttgcatatctggagctgaagagtcttccgttcctaggcttgaaattgcatttccgagtgtgtcgaaactcgtatctagtgttatattatggttattctgaactccggtgttcatcgaattggcttgaactgaaatcggcggcttcagaacctgaggcggagggaattcgcagttaataagcttgacattcatgaaattcgagttggcaatgtcagatttgtcgatatcagagtcaacgatgatacatttcgaaacaacagcgccatcaatatcggctttatcaagcactgttgtggtgggtatctggtttttatcggcatacgcggcgataatagtgtctgtaattcgcgaatgtctcatcgtaacgttgatgcaaatcacttgattcatgattgtgtttttgatcttgctgttggtaatgaaagcaaaattgatgacattcccagtagcggggacggtgtcaaagctttgcaaaatgttccaatcagatgtgaaatcaagacaatcgtcaaattgtggatcaaaaagctgattcaatacaggacttggcgcttgtgcttgttgatttcccgagtcaattgtatcgtatataagaccggtagattcggtttgttcggactgagctgagggatccatcatcttttctttcattgtcagctcacactaatatgtcataattgcttttagaagaaaaagaaaagcagtttaccttagattttacttctcaatgctcaaagtttcaggtgggtttcaatgtccaattccaagcattggcaattctggtgtagcggaggcaggtctccgtaaacaataaaagtagaagccgcgttggtatgaaatgaaggaaccaaaaataactgaataaatcctcgtagaaataatagagagtggacggtgagaacgcatctaaagggagggatgcgaggcaaagagcgaagaatggaaaacaaggagatataaacatcatgggaaatgatcagtcacgttccctgagcagaatcgttcagaaactctgagattagaaggacaaaatgcattgctcaaaacacatgacatcataaaactgagcagagctgagcactaaagtgtggccgcgacaccaattcgtagtcgcagaaagctatcgtggcctaaataacggtgccgctttccgaagagtgtcgcagccccgctcaataactcgtgctccaaaacggtgtcgcaggccccaaaattcgaaacacccggatgacttgactattgtaaattcatatcacctaagaatacagtattctcgcataaccagatctgccacggataatttaatccaatacatgctaagaatacaactcccaggccatctgctccgcaatcaacaaaccagagcctctcggagctatggctgatactcgagctcgatcatttgtaggcgttggtgtaaatatcctcgagcaatatgtcgcagattatctcgcaagcgtgccgaggcggaagctacaaacatatccatgtcagcttttggcaatatatcctgtttttagaaccctactgattaatagcatttggcctctctcatctcgaatattggggagtctctcgattttttcaccggaaacctctgcgggaatgatgattgagtagtccggtgtgccctgatatagaaacgctcggtcgtgcttgccaaaaggcaatttctcatgcgagagaagccctcgcccaacgtagacagatatggcaagtatctaaggctccatcagcttgctggtcatagaaaaatcacattgaacgaacgtagccatcatccagcacatcgtcttttaacaaatcgttcaggaggccttgcatggaaatagcaacatctatatagttagcctgtcccctcctgttcgtcggcagcaagaaaaccaaccaagcgattctacctgccatatcaagtgcatcctgcggacatgcgatgtgcacgtattatacccatggatcaatttcttcgcataaggaatgatggcggcaattcctgccccacttgccaccaacagcacactctcatatttgtccacacactcgctgattccgtggggaccactataaagggccaacgaagaaaagtttccctttggtgctgcgtgcgcctgacggacaagagttttggtgagccctccacgaggctctaccaagagatccaacacaccttgatctgtccgagaccaagacgtgatcataaatggatgcgtctgcacccatgaccataagcctagtgaaggcagccacaggttgatgtattgtccggccattgctttgatcggcctcggtaggatgaggcggactcgaatgggcgttgccctcgcgtgttggcctgcattttctgcgtcgcgctcattcttatggcagatcgcaatagctctcgggcatccgttgcccgaaaatagaccgttcctataaagaaagagtatcaagtgggagaaggatgtactgcccaaaatccccaatgcaatatagagatacaaccgggaggaatacttttcactgggaagatgccgccaaatcccataaacacttacgactgcgagtgcctgatgaagtcgaagaaacaactcgtatgaaagtctccgacagaaaggcaaggataatatgacaagggagcacagacatccagcgccctaaatttcataaagctgttagatcagatccagatagtgactgattcactttacaaacaattattgcagagagacgcccagtatttatctcctgatcctcatgggttttgccctgtagcatggccaaaacgtgaaacactaccaaagctaccaccatccagcctgcagcgcgatgcatccgtcggtaaattctcagagaaatcccgagaatatcagccaagttgctcaaatgccatgaagccagaaggaatatcatattgagtagcgacagagttcccgctcggcgacctgaggctgccatagatatactgttgaagaacaggagcagcaggttgattgcgaggtagatcaaatgaagaaaaacaccggctcgtgtccaaggccccagaagtgaatggcgaccaagaacatacggatatgcaagatgttggtaaatgaagacattcatcgcgttactccagggcgcaaagactttcaaggctctatagataacaagacttaggaagatgccaccaatggcgatcgcataaatagtcaagatatccatgttgcgaactgaaagcaaagtgaagcccggtctgttatgtccttcttatagaggaagtatcagttacaagtcgaccttaaaataggtcgctgagagtaagtatactcgacaaaccctaggagttaggtacttggtcgctgtggatggttcgagcagcataatgaatgctacttccttgcggaataccgaggacccccactgagaccttgagcaaagacttattaaccacgaagcggacaaggttacagtaattcgaaatattatcatatatccaatggctccaagttccgaacttatctctacaatcactgccaaacaagacagccctcgcgcgagagcacagaaagtacgcaggcgcagaaaaggtcttttcaaaaaggcagctgagtacagtattaactgtgagtcggacgtcgttgtagccgtccgaaatcggcaaagtggtcaactatatatcttcgagtcaagtaagaagaagtggcttccggcagaaatggacatggtatgaattttttgtcgtgctggaagccatcttgcttatcaacttacaggacaattattatccacggccaattacggagaccacggaagacattattccttgcttggagaggttggaagaggaagaattgcgggcggatatagaatgaattaatatatctatgttattgtcacagtatcgttgtggggagatatctcgtacttgtatagaaggctagaaaatagaaagcgactatagggctgtgctgtcctgttccatcacgttgagggagattttatcaattaacagcatcaaataattcggtacggtcatgtgtagactccagtctttgatgaaagagctcacgtgatcgtatcgaatattcgacacggtcacgtggtaccagaaccttctccggaagttccactatcccctgcccccctcagtgcgaaggaacaaagattttccatccgcgctcggagtgcattgagcgctctgtctacgtaagccttcgtaaggcccatagctcaccttcattggtccattctcagttcacatgatcttcctgcaccgggcattgattaattcagacctgttgaaatgggcctacttttttaaccaccccgttcaacttccactccgtttctcacctgttgcctttaagatgatcaaaaaattcgtgcttatacgctttttcaggagtgatttagtgtttagaaatgccgcgtataccttgtataccttgtatacattcaatcctcttttcaggctatgtttatcgagttgtcgaagtatgatgcgaattcaacacccctcatgatcagagagggtgagcgagtccgaaatgaacaccgggcagagggcgaatcccccccattcaggtcttcttcgcccgcccatctctctacgatactctactccacgaaaccttccagtggcccggccaaatcacagctttcgtcactggactttctatttcgctacccaaagcttttgtgtcggaaatgctccaacttaaattaactctaaatgtgagttgttttcttgcttgaatctctcatcatctgacgttgcctacagaacactcatgatacagagcagaacattctcaatgacttactaccccctccgtcagccgataaggtttgtcatttccacctccgaccggtcgcaaggtatctaattcaattgtagattgcacgcttactctgccactgttgcaatattctatcttccctttctcgcgataagatcgccctcctctacgagcgagcccgaacgagcacagattgtcttgtcgactttgatataaaggaatactgccaagtgaagtcgcctgcagcaggtacctcgacctttggtagtgtcgcacatactagatcgcttgagccagcctacatcggtaatattttatgtttctaacgcacgaaaattaccgttacttactttgctcaacttttagatccttccttactcacgacgagtatgaacgtacgagaccgcaagatagcgccctgtgtttcaacacctgatcctagccattttccaaccctggcactttcgaacgcgggagtcatgttgagtcaagcagcctcacccccacgcggtaatattcaaaaccctacagagatcgggctattggcgtttaaacaaaggctaacttaggaatatagaaacagtccccaatctccataccaatccgtctcccgtcatcccacacgatggttgtctctccaataagttcgactgggcactccgagaatataacaatctaaacgcaccagacccttcactcaatttcgctcctagatcctgcgatccaacaaaagaaggtgattcatccatagtacatttgacaggagggtccgaaggtcaataggctcccggcatagctttcgataaagatggtcccatagctagcatcccaacgtctcaatctcctgtatacggccgccctgtagggataggtaagaggtcaccagaaattccaccgcatcatgcttccgctggtattatggaagaagggggtttgaatgagatggaagtatcggatgctgaagaagaagcacaacaagatatcacgggcaaaaatccaattgaaaatcgcccagccgatggattatcctctccatctctatatccagttgcaggtatctcttatcccacacctagttcaaatccgccggatacgtcagtcccaacgactaggcgtgtagagcgatcggcagaagtgacaacaagcgacgttaactcagaagatcgaactgtcgacaaatatcagagtgcacgcaccctctcgaaattacagccaacagtcgaagatacccctgataataccgaaattgataattcagagactttatctgtcaatgacgaagacttattgatggatgaagactttagagagtcggacattaagtccgccttggacgatgtggtcaagtttttgcaggacacttcttacaatagtgggaccccttcaactagtgccaatacttccgtaaataccaagtcaaatccaaaaagattaactccagtgtctatctctcctacctccaatagaagcgaccagcataagcttatcaatgggaaacaacagaccaataatattcaagagactttagagtataaacgccgccagatcttacagcagaaacggaagcttcctgccagacttgaaccacactcaactctctacaccaggaacctcaggccccgtcttaacaggggaaaaagtgggaatcaagccccacatgacgacaaacttacagaggatgttggcaaaaattcatcctcggaaggagtcctagcaggttcagtggccaaaagtcgcgcagattcttcaagtattactcatctcaagacatcggtaccctccaattcagataaagacaaatagagtggtcccttattataccattctctcctgtccactctatcatcagaaaaaaaaagccgagattaaaaggaaatgcaatcgtatcttacgacctgatttgcctaagttcatagaaaagcacaccaaatcatagaaggctaccggattttaggattctccacagcttagcgtggagaatcattccctcgtatcctccaacacgaaaggctttacaatttagagatacgtagatactatacagacaggcgaagagacacattacctcaaatctcgacttacagatatcatactttatttagcgtatatcaaagaacttcgcagacaaaaagataccggtcatcccccccagactgcgaaggtcaaagccacagacatcatctatagcacagcgtccctttctaaaccattagcagagaaaactcagaagacttttcacgagcacaagctagttggtgagcgctagtagtggtccggttaccatctcggacatggattttttctcttatatagtcaagaaacgggaaagaaaatgtacagtttctccaagttctctggcttcgcgtcttccgctaattattctacagacaaagcaaaattttttccttagacgcttttattttatatattctttagaactgccagaatattctcgcttattacagaaagttcgaacaatcagtagataagctgttatccggcggcaaattcaccgagcagctttctaagaaagaagtacaattatagatccgcgaggccaaggccgtcagctggaacaacacacataccgcttactggaagccctagagcacaaataccgtggcaagcaaggcgtcggaatttctcttagcccagtcaagctgaacattttcgccgactttgaagctctcactgttcctattagttctcgaatgtatacattcgtttactattacactaacatctacacatctttaagccttaccctgcactcgttacagacgtagttcaattattagcaacatacgagataggctgtgcgcagctacagtgactgcttcgttcggaggttggcaacatttcagcgccgtatcggtttccaattcagcccctacaagcatccacggatatttagataaaccaagtatcgcctagtcactgcttaaattagatacacctttatacggaaacctttattttatattaacttggcgtaggcaggtgtgatacaatcggtaatatcgtgatatttttttaaataaacaatggcaagcgtgacgtttatcctataacactcagcccaggtctagcttggtcgttagacagatactaggctatataccataaggtggatcccgggatttactcacttatttccagtatacagggattctattgtcctttcttttacttcctcgcgctacatcttatatctagagtgaactataagttacatattcttaatattaattattcatcttgaaacactatccacctctaacgtgattccttaccgagcggccatccctgccgagcggccaccccactccaaatttcctatctcctaagcaacctatgttttcaatcatccactatacccctaaaacacactaaaaaagcccaaaaattcatcgaacaggagggcaggatcttattagctatcaaagctattcaaaatagccaaattccttcagtcgcagctactacacgctctttcaacgtccctcgttctaccctgcgggcccgtctaaccggccgaacaaatcggtctgatattcgaccaaacggccataaatttactcaaaataaggaggactcgattcaggattagttaatctctatagattcgagaggtacagctcttacaatcgaaatattacgagatatggccaatttattacttcagcgccggggtgataataccccccagactattagtaaaaactagccaacccaatatcttaaacgacatcccgggcttacaagccgattctctcgcaaatatgactatcggagggccttaatagaagatccaaaggttattatggagtggttcgatctctttcaaaaaactattatcaagtatagggatatttacaactttaataaatcaggctttacaatagggattagtacaacgactaaagtgattacccaatcattttataccggtcggagaggggttttacaagctaggaatcgtgaataggtaactataatcgaggctattagtacatctggatatacgctaccaccatacattattttcaaggggaagaactttatggaaagatggttcgacgacctccctcaccaataggctataaaccatagccctaatagatagacgagtgataagattggtattaattagctacaaaaacactttataccgcatactacaagccgtacgaagggaaaatatcgtcttttggttctcgatagtcacaacagtcacctaacagctcaatttaataagatttgcgaggaaaactatatcataccaatctatatacctgctcatacatctcatcttttacagccccttgatataggctgttttgcggttttaaagaggtcttatagaagccgggttacaggatatacccgattaggcatcaattctatcgaaaaagataactttatcgatatattccctatagctcgtacggatactttcaaagacactattatttatagtgcttttacagctaccggtttagtcccatttaaacctaatcgagtgctatctaagctcaatattcgtcttcaatccccgcccctactagatcggcctagttcgcaaggctcaacatcagatagcaatatctcgactagtatacctcagaacactaagcaactagcaaaacgcaaagctaggatcgatactgtactaggtaataagtcaaataagctatctagccctactaagcgtgatcttgagcagtatcataatataaccctcaagatcatacataagcttattttccaggataaggaaattaagcgattacgggctgcaaatgcaaaacaggtgaaaaagagggctaaatcgacaaagcagatatcctaccagggtagtctaacaaatcgtacgatcgctgatatagatagtaatagtgatattaagagatatatatctaatacaccatctatcccaaccctcccggcagagcccgaactacctattttacctactatacgtcgtcaaatcatatgctctaggtgcagtcagaaagggcatcaaattactagatgccctagagcttagtttagtgaatttaatggcgttttagttgattaattaatgtatgaaaattcggaatactactagggtagccgctcggcagggatagccgctcggcaaggaatcacgttacgtatacgtaagaccctctcattacgtaaccgaataaacttatcggagcatatctatctctctgaaacaatataagatactccttactaaaacctacagtccatttaagatctaagctttaaatttcttataaaaagtagcaatgagatgacactacctctcttcactcaattgtattttggagtagttatatttcaagccattcatactgcagcagttctacggccgactttcgataggtcgggtcaattataagcatacctcgaaggaagtcgatgaagacgggaatttcagcgtcagacatacagtggggtttaataagtctgttcccacccgcattttcacccatgaacattgaaatatatatctttatatatctatgcatagcaccaccatactttactcaatttacttcgaattaaatagggttgaaccctatgccaatctcgggtaaaatttaaatttaatattttgtataatacccctttgccttctgtactgccatatatctgcgccctatacttaaaatcaatgaatcaatcttcgactgcggaatagcatcctatactatctttatataccttttgaatactatctaatcctcctcagaccttcctatatatattagcttaggaaataactcaaaaagtttaacctttagccaccgctatataggttcaatcgggtttaaatctagtgagtgcggcagctactcctctatatatatcccgtgagttttaaaccattcctgtgtgattttagtagtatggatccgagtgttatcttactaaaagatagagtagggtcgatagaatggaagtagaccttcttcgagagtatctatataggaaatagtagtatatcctgtcttcttcgattccgggttaataatattctcccgccttataataatcaactctaatcgacttcttaaccagattgtaccctaaaccatttgtgaaatatctttaatgtataccttagcatttataagatcttttctatagccctccgaccgaaagcgccaacaccattgtggtctgcagtttgttattcgttgtacagaatactcatccgagaagacctagttttaaacgttatttctagaccactcagagcgctatttttgaataaaacgatatcgttgtcgagctaattcctttccgattggaatcttcctttttgtcctatattttagaagaccggttggccttaaaacgttaataatagtagagtgggatagatgactaggtatagtataactcagcgttttataggaccaaaaggggtgctagcgggcgagtataaaaagtaaatggtgagttcgatcactaaagatccttgggcgaccggttcgagggagagatttaatagtattgtgttctttgaaccgtttcaaagtattgtaaatcgttcggcgggagcacctaaaatcgagtgctagctttgactgggtggcaccggcctggtgggcataaataatagctgagcgctgagtaacagatagcttacctgattttgtacgacctaaaccaaggatatccttggttaatgccattggggggtgtgtaggaagaagaaaaaaaaccacgatggttgttagggggatagcaagtggggcagtgggaacagactttttgaacactatgtatcattgggtttaaggaaaggcctttcagcgccatctattagcctttcaagactagtagatatcagatctaagattcgaagaagaccgcctaagcagaattagtaaaattaggaaaatatgatattagcacttcttatttaaaagaaaggcataccatctgtattaaaaaattccgcagttctgtttcctttccgaagaagctcaggcaggaaattaccaagtatttcgattatccttgcgagccggttatcatcaaccgtccacaaaccgttttttaataccactccagaaaaaggcactatcccctagacaaattcaataatctattaaaaattaggagataaaaggcaacctcgccacagtttaagcgaatagattaaatacctataaggcaaccgaggctccagatatcaaccttagtatcctaataggcaccgatcgtgacttctagtactcgtaaagctagagattggattatatctaacagatgattttctgaccaagaagctacagccaaggtaagtgtcgcccagaaagataacaagacaagtgatacatactaacaccgaagtcaactattctaatatacagctcacacatctctgagataagcggcgtcctaataacctctcggagtagctttataataccacacttattactaacctatacaggaacttcagatagatatttatcaatggttttttccggattttccagctcaagcagtatattcgtcggttttagatctatatatcgactataattaataccattattgtgagtaggaggctattcgtaacatatggtattaccggtataaatgattccacactcctcatagaggaaatccaaccctagtagaagctatcgcgctatagttcttactaccttagtaggcaatctcccattttcgtattttacagtttaaaaatccaagtagtggcccaacacgtcaaacacaaagcatatatattgtccatttggccctttgtgtttgaattaatctagaaggggtaacacgtaatatcggccttcatggttactttttctagagatattagataatttcgagagaatttctcgctcaaagatatcatacgagccaccgtagcaatcggctcttagtattttaagagccacatacctttaaacccttcaatactcgataagctacatatttaataaatgtggagaactacactcacttagaatccctagctaaccaaacggtagaatattgtccgtagcctagtttcctcatcactttatatataccggagttgaaagtatctccaagcgaaacgggatagaagcctccagtagaataaaagtctacctcttctattatctagtataggtagggagctcttgacgtttaagaaacaggttcaaagaattttacaagccaagctcgagaatttacccgagtcaaagctcttttaaaagtagtaatcatcttaggatttttttggcaggattagtggcatgaatcttttgcaccggtcatcgaacaaattataaataattccgggggattcccgaacgcttataagttactagacgagatagtcacgtgctcttatagcagcatagctcactcctgtgctaagagcatcacatatatctaaaataattagcgtgtgaaactaagctactgagtgtctatacacgaagaacctctgggactttaaaatgataaaggccgatcttaccataaggcggtcgctctagcttctctgctcgcggctcggcaataactcatctccacggtcgcatcgatatgactcaatgtaggtccttgtttactcgactcgagcatggctccgtccacgaagcatctctttttaattatccagcgaattacacgcaaacctttttagaagattattgatctactctctacattacttaagccgcggggaggattaaatcaatagaacttcattatcatcactagtcgctctcacaggctcagtggactacttatagtaggcaggccatgcccatttttggctaaacgtcatatatttttcaacaacctgcagatataaatataaaaagtttgcaattacacaagcaccccaccccgggtaggttttatatctcagacctcctgacaacgttcaaccaacaaagcctagtaccgacccacaaggaaagcgcagcgcatatcacagcttcaggtgcgatttaagtaacatcacgtgttttaaaccgcacagcgaagtcaacgtatatcaatagatatatctctttatcacaaattcaccatcctctttaatcatctcaacagtccagtactctcctttagggtctaggtttctgggatcattatatttcgctcccctgtattggtaagcaagccgcctttgacacatataaaagcacttacttaacaaccgcttcagagactcctcgcttctccatactatctttgttggcatcatagaactttttgatagccgtctcggcttcactacgcttctcagggctattcttatagatatcttccctaaaccatcttatggccctaaggggatatcctagaataggagttcgaaacataataaatgtaaagataaagaacagaactttagcaataactatccagtttagaaagaaaattgtctttagcttaaaggagggcgaaagatactgctatttaacatttctagtatttcgaactccttaaaattgcgcataaagggcctccaatcgataaacgcttagaccttggcgtgaaattgctaaccaagtacactaaagttcaaactacgaggcaatacgcgcgcggcaggtcagaaatacagtctcggccaatagagactaatatcacctgaacgaaggagcgccaaccccgtagccgtagtgacatacataaggccagactaaacgccactaggtatacccatattctagaccctacatatcaggtagttagcaaatggcataggatatagctacatacggtattacgctattattattttaatcgcgcgtactaaaaccaaaatacatacaaaatagcgttagcggcaaggcgcacgcaaccttccgaaataagcaactaaaagagatcaataataaaggctgaatggggccgatgtcagaccgccctaatacacctgtatatcaatcttgatcaggggtcgtgctgagcagatcagctgtaaagtcctcgaacacgaccaattataccacgtcccttcggatggccatccagaaggctacgtttcgattggtcttcctggcactaaactatatttactctacctagggattcaatcataggaaaaagtaactggtagctaaatatatacctacggggtatatctaaatctctcggccgtctaaaataagttaattttgaaaatacttaggatacaagctagccgttacagtactgtagagtacgtaaaatatatatgcacggataggggaaataaggactacgagaattgcgactcatcctacattctctccagacacaccaatgattcatctttttttacacaacaaagtacaaaatccacgagatcactttccattttgtatgtgtctctatacaatgaacttccggaacggaggactaacatacctcaagattattcgttattactaccttatttttccgacttaggctcccgtcatatgacgttaggccgtaacagccccgcctattcctacatcggacgaaatgtcgacaagacccctcgcttcccaaagcacatctctctatagttggtaagtatcaaaccaggtcgggtaaaaccatcaagctgactttactacagtcaacttctaggctttacgaagaaatagcgggtaagcccctgtgggaaagcgcgaaaacgatattgtcgaatataaggggtcttatccagagcggaagcatggaacgggtcaaagagagtaaattaggctggcaataccaccttttagaggaatacatcgcaataaaagcagatatagaagctcggggtcataaagtatatatcatcttaccacagccattttataatattaatcttacagtccttatctaggtactcgattgcacagtctttcacttcgcattagccgctaggcttaagaaccccacaaaacggctgtggctcgcgcccatacaagggaaatcaaacttaacccgtacagaaaccttactgccgggctcatactgggacattacagacatcgatcgagttctcacgccagaccgcttcaccggctcagacatcctaatagtaacacttgacaggagtggaaaaaattagatacatgaatggttagttgtcaggacacaactagttagtagaaagcaaattgcaatgtatacaacaacgatatatattatgatcataccgagctcttcaatttcaaaacacagaaagcatagggcgttcgtgatatagaaggttattgtcgtaattgcggaggccctcagattagcgttcgctctgggtagtcgataaaatagttctatagccgggattgaagactagagagcggccaggatcaaactgggcgcagagttccatatccaccgtctcatcctagctaaccgaagggatcgtcccgtagtcaaattggttgaatactggagggatgctgccagggtcaaactaggcgccgagatccatatccgccgtttcatcctagctaaccgagggaatcgtcccgtagtcaaattggttgaatactggatagatatggccagggtcaaactgggcgccgagatccatatccatcgtctcatcctagctaaccgaggggatcgtcccgtagtcaaattggttgaatactagagggatactaccagggtcaaactgggcgctaagattcatattcaaggtttcatcttggctgattggccggatcgtttcatagtcacattgattgaaatttggtaaaacttgatccatgtcatatcgggtgcggagttccaagactctactttcatgctcaaaaactggttgtatctgtcttatcaggtatacagccgcttccgtactatgactcctagcagagctcatatctgtttcggtattccttaagtgagtcagaggtcgaggctccgaatcctgattgatcaattcagagatagccagcggaacgcttctttcccgtggcgcttgaatggttaatattgtattgtactcaatcagaggaggctgtcgtctatcatatgaatatgagtccggctagtaaagattgaagcgattgtttgatattgtaggtccagaggtaagtagataactgcgtgtttgctcataattttgtggttcacccaatgtcataagttgacttggaattgtatagagcaaacttccgctaatttcacacccccaagttctttaaatctttcgccacatagtgtgccttgctaccgtcgaaattagaggtactcttataaatgtacgacaaacttaccatcatatcggatttgacaggcagtcaaccataaagatttgtcctttgccaaatcatgccaggcaccagatttccgaagcagatgtttcagagccacgaaacttccatacttgacctcgcgaaacaaggtgaacaataatatcaaaatggctgacactccaacgtgaccatatatccgttcgaaaacgagcaaacgaatgccgtctctaataccatgagatgccgattccttgtttttgaatgaaatagcgtttgatgccaggaacctgttgatgagcccactgttatcgtcaattacctgcggagctagtgaacgccctgacacttgtgacgttccgaaggcttcacgttcccattcatcgaactctattgcgagggacctttgtccaagtccgcgtcggaaacacgcatccagtgagcagccccggttgcaaagtcggatatcgaccacacgagggtcctcttgtacccaatcgtcaccgttctgcgcaagtggatcgggacgagaagataaatatttgaaaaccttttcagatcgacgggcaccctgaagcgcatccataagcctttgagcatccaaggcttctgatgcttcctcggtcgtgtcattgttttcaccagtctcttccacaaacgattgggtagcgcaggatgtcccactgctaggaggtgtttccgagcaagtaatggaagttgttggtgtaggctgctgggaagaatgttggagactggtttccgaccgtggagcctcgctcggaatagtgtctagtgttctctctataattcgcaaggtttgttccaacttggttcggtatggtataaggtcttgagtgctaattgcacccagtctcgacaaattttgaatcgcctcagcaatcgcagatatgtttatcattatggggaagaagttgaaaaatggagaaagtcacggtcgagaagaacgatcaaggccgaaatagcgggcattgttcaccgctcacgaactctcagatgcagcgagtatgtgcgtatgggatccctgctagtgcgccccaaatcatatttcgggcgcactagcaaggacatctcctgcctgtggcgcatttacccctcagctcatcggctgagtcttctcaagaggctgcctgactgcaacctgttggacactatgaactttaaatcttggcccgttgactgcagctaagctgttgttcactaagagataagtttttcttttcttcttttctttttttacactagtagaggatgtcgttggacaggatggggttatcagttctcccccgcttagcgacttgaatgcgattttggtatagtaacatctgaacaagagatgccgactcttctctgtgtatcctgacataaagagccttctgattttctgggctgtcaatcattcgaaatctcatttgagaatccacggcagcgagctatgatttgcttcagcctacagagagtttattgtgcggtttcaaactgcatttcccgcctcttctccttcccaaacagctcgcgcgagacaattctatttgggggcccagaccccaatcgaagtagtatgcatgcacttgcgaaaggcgccatgcctacgatgttggaagaacagccggccttttctcccccttcagactctagtctttctgccaaaaactcagtaccgattcgtttacatgtaagtcaccctttctcgacattaacacaaactctaaccaaataagaccgtacgaatttggttttatcccaaaggttttggacttatggaagacatcaaaagaaagggcctcgaggatgtggtttttgacgccattgttcttccagatgtcagcactcagcatccctcccaggatcctggaatcacaacatccgcagtcttagtggatcttgcagtatttgagatcggcatctctcgggttttagggaaatatgggattctaagattcgatcctctgagcagcgatgatccgattgtcttgcaacaaccagtggaagacctcgactcaaagaaagctctttgctatcagcaccttcatttcaaataccgacaagagtatgaaaaaaggcagcaacttgcagaaatcttgggatatcagatgcaacagattttgacggattggtatgaagcctgtcttcaagacattggcaaacggtttgaaaggctaggataccgttgataaagtagatacattctcattcatcctaataactgattttaccaccaaatgagctcaatacagaaagagtaaaaagtcgaaactcggaggggccgtgtcacacataattcttcgatagtgaacctcaagtatttccctcactgcaatgtcgtgtggttttcgtaggaaagtaatcaaaccctgcgatgcttgagaagatgaagcatcaaaatgccaggtgattacggctagcattaggacagtgccataactgaggtcgtgaaaaacatccccctggagagagagtttctcatcaaggtactgttgtcgaaccctgctgttccgcaaatccttgcagacatctaataataacctagcatcgtggctggtgtcttctggtggtgtccatctcgaaagtaacggagaatccattctcaaaaagagcagagcctctagagcaattcttgccggcttgtataggatctgaagcggaaagggaccaggctttgatataagaatttcgtgatcaccggctaaaggtatgggtactcaccatgatttaattttttttcccttaacggcgaggtgcagtcgatggctcccttcaacaatagaaacaagtctttttatcaccgaaattgaagcacacgcccgaagcattttgtctttattaatgttattatcaagttatctacagtgtttgaaactgtatccaaaataggcctcatgtcttgcctttcttctctctcgttacgtttcattactcctgactggatagggtacctttgggggccggaagaagaccggaaaacaggcgaagatcgagaacctgcagctttcaatcctgtcagtccgtacaagtggaatgaacacgcggtctaccggttggaaaatgataaacctccattcagccctaagaagcctctaccagtatgcctcccaaagagaacagagacgatcagggcatcgcgcatcagatcatttgaagattatgcaagtgagtttttccacaaagggcaggactcctgattgtgccttctcactctttatcacttagagcacagttctccaaatgcctctcttcaatcggacggcaacacagacagagaaattattgagctccacctccctccaagcactcgacttgtcagaggcagagttatcggcgaagtaccccatggattaactctttggaattacaatcagacattcgttgaacatggtgccaaaccttgatcagaacaccgagcctctagtaaggttacttcctcattacttaattctcaagtttgttgactttttatagcttttaggtatctacatattggcggtgctgaaggtatttcgggaggctcgtagttagaaacatggagaatttggaggattgcagacaccgaaagcgaagacaggccttgatatcgagcagagatatctagaagaggaaacaattgggagcaccaaatacaaatagcaatatacacgacgaaattgcaaacccgccaatcttgcatataatgttatactagccacttttcggatttgcaattttgtcgaaaccattactaccatgtaatatgaaggagtaaatattgacgtatagtgaacattttgaattgattcgctagagctctgcagtaaatgacacaccgcgtctgaggtgtgatcatgacctttgctaactatagattacttcaatggaagtgaaaaatagcctggagagatcggctatttgcaaagcaaaggtgggtttcatatatcttcttctttcacaacaggcgttctccaattctcctggttgccttatagccagatttctatgaaaaggcatcaccacgagcgaagcatccatattcttgcaataaaccttcattattttcatataccaagatgaaccattcgcagtcatccactggctcgctcttcgcactccaaaacatgatcaaagttcggtacagcgttatacaaatgatactgatacttaactatctcttcatcgcatcatcaaccgtcgagaatgaatccaagcttcggagagttataattatggaggagaaggaatgggaggcccgcttcgtgcctgggcgctccaacgacatgcaggtagaaaagtggtggatagagacacgaaactttctcacagaagcaggatccctccgtgcgttttcagtggaagatttaaaaggccacctcgggtatatgctcttcatgcttggcgaaatttccctacggccgccctctcccaggttcatgccaaggacgcggcaaaccccttctagaagaccctttgggagtagagcaagtatagctctcatttgctacagcatttcgggagtagccaatatcagtgactatcaatcagttgatccatggttatttgacatgggattcgttcatgatatgctccgccgtcttcaaagatcgcccttattcgataacgacattcggttagacgaactcaaaattgtgctcacaaatctagaagcgattttgtctatggaagatgagcggtccgctttgattcaacctcatccaatcgacatcaaaaatactgttcaaacacaagcttattttgcgacagcatttcgtgcacttgaaccaagcatactattgcaaattttgccgaaatggagaaaactttggatcgaatccagagagaacaacaaagacaaattgcagtgcctgctcaaggaaccaatgactcatggtaggaagcaggacgctattcattttgctgatgccgctttctgacattgacagatatgagagtacaacatattgcacacatctttcaagaagtctcatctatgaatgcactagtgcaagagacaaaggaggtgaagctgttaagaagatccaagcccgatagaatgatacttgttgagatttttcaaatcagaggcatccagcaaagatgcgagaatatgcacctaggttagccgacctgtaccgacgtggcatggcatggactaacatggtgcagcagaaccagtggtagtccacattgcccaggtctcgccaaatccgtgaggtgctcgagccgaacgcccttcaccaagaacaagagaaactacaggaactgggcgagatgagggatctaatcgggacagatgccctaggctgggtttcagatgaggatgagcttgaacggtgtaggggtatcatccagagcaccaaagacggtttgatggaacattcaagcactgagatggataaaattgcggtcctttcccatttccctttcgatgaccacgaacaaaatgcgtgataacttcagatctcgatcttggtagataatatttattcatatatagcttacggacatctgaagatagcttgtcccgaatttgagcaacagatgatcttccacggcgattcgctcgtagttctcgagaccttgttctctactaatcgggaccccaatacctttgatggctacctctttgtggatcccacgactggggcctgcaatataagcagcacggtcacacccaccgaaaagtggctgccatttgccatcggagcctcgacatgccctggacgtcttgctgaaacaagaattacccaggtgtaattctcgagatcttgttctttgctaatcaggacctcaacccctttgatggctaccgctttgtggatcccacgacgggtgcctgcgatataagcagcacggtaacagccaccgaaaagtggctgtcatttgccatcggagcctcgacatgccctgggcgtcttgctggaacaagaattacccaggtcatgttcgccaagatcctatatggctaagatgcagatttggagggtgtcgatgcgcaattatttccaaacggggcggccgaatccggccgcgccggcacaaaatgctttttgtagctaggttgacttcacacacgtacgagatggccctgagctacatcagtatacatcgatatcattgactagttatccttcgctaaagatagacgttgttttctaagtgtagtgctccagtatacctgtattgaccctgagctcctcccagggaatttttgacaaaatcgcttggtcacttccggccaagcaagattttgtttttcccgaagtttcactaataggcgaccctcttccacggaccatggtagaccttttcttgatgcacacgtatgctctgcattgactgtatcgccgcttgtgcttgagttgctggacgtaggtgtcatgtcttcatcgtggtccgagatacatgttgatacaggcgtgtcatttgtggtcgaaggcgagggaaggcagcgaggtaaggcaccctcaaataaccaagacaggaactgtagtcggttattaaccgagagggcggagaattgagcacgaacggtggggaatgaaacgtcgttcttgcagccgagtccgcaagcaaatcggcgggtacgattcttaccgcggctttccacgacacctgcaactttgttgattttggaaagctgccgaataggtttcaccttgcccttggagctatgtcgtctgccacgggagcagacatctttgtccaaaaatcgagaattgccagctggtgattcgcttgaacggattgcgacgcgaggcgtaggctctgccgcttgagtctgcctaacatccgggaaatgatacccgtccaggattgccgggtcgattgttgcatcgtctgaaagatattcagtctgagtagggtttacaggagcctcaacccgagattgctgaccagcagtgaaagcgagcttcgggtcgcctgattcgaagctaggcagttggtgctcagagtcctgaccaatatcaccgaaaattgaactatgatcaacgtttccatggccagatagatcttgcgcatgtaaaatactctcagggtcgaacgtctcaatgtcttcattgaagggtggcggtggctccaaaacctccggcccgactcgaacgatttgtgtgtgtggttgcaaatcgccatgcaaacaaacctccatcggcggacgaacaggaagaggatgcagcttaggtttgggtaaagagactttctggctctctgaaaggggatccctggggtttgagggagacggtgcggcagcgatcgagacgggacttgggtagcgacaggtgttgacaggattccgcgaaggctgcgctttctcttgagtaggattccaagaccgaaaggtctccaagcgataagtggcgcttgacatgttgtgtagagaaggcggcctaaagggttctttggagtctggtggttgggggaacaggggagaagacggggaaagggaaaggggagctgggagagggaggagagggaagaacttggaacgtgaattccaatgttgccatctgagaggaattggcgactcttttatgtatgaaaattgtccgcaaggccaatgccgccctttgcccagtacagaatatcccaatcagctcatatgacccaggccgcgggctctaagacgcaagtaacactagcgcaagtcgaaaaatgttgtagttccggccacggttcacgccaccattaacatcatgctagccctctgcccgtccttgatccgcatgatgcagcaccgatgtcaggtgcgtatgcggcatttccgctattggctcatcacaccgccgaactgtgatatcgaaggctccttgggtaggtgcagagttgaccgtggagaccgacgatgtctccggcggggcgaaaaagcattcgtgagcaggcaactcgaggatcagcgacgccagggctgtgcaatgtaacctcagacgggagctgacgtggctggtggagttgggtgcgcgggctcaaggatggtatccgggacattgcaatggcgaaggaggtcaggaaacgaatagcagaggctaggagctccgggccaggagctccggggggggggatcgagctannnnnnnnnnnnnnnnnnnnnnnnnnnnnnnnnnnnnnnnnnnnnnnnnnnnnnnnnnnnnnnnnnnnnnnnnnnnnnnnnnnnnnnnnnnnnnnnnnnnnnnnnnnnnnnnnnnnnnnnnnnnnnnnnnnnnnnnnnnnnnnnnnnnnnnnnnnnnnnnnnnnnnnnnnnnnnnnnnnnnnnnnnnnnnnnnnnnnnnnnnnnnnnnnnnnnnnnnnnnnnnnnnnnnnnnnnnnnnnnnnnnnnnnnnnnnnnnnnnnnnnnnnnnnnnnnnnnnnnnnnnnnnnnnnnnnnnnnnnnnnnnnnnnnnnnnnnnnnnnnnnnnnnnnnnnnnnnnnnnnnnnnnnnnnnnnnnnnnnnnnnnnnnnnnnnnnnnnnnnnnnnnnnnnnnnnnnnnnnnnnnnnnnnnnnnnnnnnnnnnnnnnnnnnnnnnnnnnnnnnnnnnnnnnnnnnnnnnnnnnnnnnnnnnnnnnnnnnnnnnnnnnnnnnnnnnnnnnnnnnnnnnnnnnnnnnnnnnnnnnnnnnnnnnnnnnnnnnnnnnnnnnnnnnnnnnnnnnnnnnnnnnnnnnnnnnnnnnnnnnnnnnnnnnnnnnnnnnnnnnnnnnnnnnnnnnnnnnnnnnnnnnnnnnnnnnnnnnnnnnnnnnnnnnnnnnnnnnnnnnnnnnnnnnnnnnnnnnnnnnnnnnnnnnnnnnnnnnnnnnnnnnnnnnnnnnnnnnnnnnnnnnnnnnnnnnnnnnnnnnnnnnnnnnnnnnnnnnnnnnnnnnnnnnnnnnnnnnnnnnnnnnnnnnnnnnnnnnnnnnnnnnnnnnnnnnnnnnnnnnnnnnnnnnnnnnnnnnnnnnnnnnnnnnnnnnnnnnnnnnnnnnnnnnnnnnnnnnnnnnnnnnnnnnnnnnnnnnnnnnnnnnnnnnnnnnnnnnnnnnnnnnnnnnnnnnnnnnnnnnnnnnnnnnnnnnnnnnnnnnnnnnnnnnnnnnnnnnnnnnnnnnnnnnnnnnnnnnnnnnnnnnnnnnnnnnnnnnnnnnnnnnnnnnnnnnnnnnnnnnnnnnnnnnnnnnnnnnnnnnnnnnnnnnnnnnnnnnnnnnnnnnnnnnnnnnnnnnnnnnnnnnnnnnnnnnnnnnnnnnnnnnnnnnnnnnnnnnnnnnnnnnnnnnnnnnnnnnnnnnnnnnnnnnnnnnnnnnnnnnnnnnnnnnnnnnnnnnnnnnnnnnnnnnnnnnnnnnnnnnnnnnnnnnnnnnnnnnnnnnnnnnnnnnnnnnnnnnnnnnnnnnnnnnnnnnnnnnnnnnnnnnnnnnnnnnnnnnnnnnnnnnnnnnnnnnnnnnnnnnnnnnnnnnnnnnnnnnnnnnnnnnnnnnnnnnnnnnnnnnnnnnnnnnnnnnnnnnnnnnnnnnnnnnnnnnnnnnnnnnnnnnnnnnnnnnnnnnnnnnnnnnnnnnnnnnnnnnnnnnnnnnnnnnnnnnnnnnnnnnnnnnnnnnnnnnnnnnnnnnnnnnnnnnnnnnnnnnnnnnnnnnnnnnnnnnnnnnnnnnnnnnnnnnnnnnnnnnnnnnnnnnnnnnnnnnnnnnnnnnnnnnnnnnnnnnnnnnnnnnnnnnnnnnnnnnnnnnnnnnnnnnnnnnnnnnnnnnnnnnnnnnnnnnnnnnnnnnnnnnnnnnnnnnnnnnnnnnnnnnnnnnnnnnnnnnnnnnnnnnnnnnnnnnnnnnnnnnnnnnnnnnnnnnnnnnnnnnnnnnnnnnnnnnnnnnnnnnnnnnnnnnnnnnnnnnnnnnnnnnnnnnnnnnnnnnnnnnnnnnnnnnnnnnnnnnnnnnnnnnnnnnnnnnnnnnnnnnnnnnnnnnnnnnnnnnnnnnnnnnnnnnnnnnnnnnnnnnnnnnnnnnnnnnnnnnnnnnnnnnnnnnnnnnnnnnnnnnnnnnnnnnnnnnnnnnnnnnnnnnnnnnnnnnnnnnnnnnnnnnnnnnnnnnnnnnnnnnnnnnnnnnnnnnnnnnnnnnnnnnnnnnnnnnnnnnnnnnnnnnnnnnnnnnnnnnnnnnnnnnnnnnnnnnnnnnnnnnnnnnnnnnnnnnnnnnnnnnnnnnnnnnnnnnnnnnnnnnnnnnnnnnnnnnnnnnnnnnnnnnnnnnnnnnnnnnnnnnnnnnnnnnnnnnnnnnnnnnnnnnnnnnnnnnnnnnnnnnnnnnnnnnnnnnnnnnnnnnnnnnnnnnnnnnnnnnnnnnnnnnnnnnnnnnnnnnnnnnnnnnnnnnnnnnnnnnnnnnnnnnnnnnnnnnnnnnnnnnnnnnnnnnnnnnnnnnnnnnnnnnnnnnnnnnnnnnnnnnnnnnnnnnnnnnnnnnnnnnnnnnnnnnnnnnnnnnnnnnnnnnnnnnnnnnnnnnnnnnnnnnnnnnnnnnnnnnnnnnnnnnnnnnnnnnnnnnnnnnnnnnnnnnnnnnnnnnnnnnnnnnnnnnnnnnnnnnnnnnnnnnnnnnnnnnnnnnnnnnnnnnnnnnnnnnnnnnnnnnnnnnnnnnnnnnnnnnnnnnnnnnnnnnnnnnnnnnnnnnnnnnnnnnnnnnnnnnnnnnnnnnnnnnnnnnnnnnnnnnnnnnnnnnnnnnnnnnnnnnnnnnnnnnnnnnnnnnnnnnnnnnnnnnnnnnnnnnnnnnnnnnnnnnnnnnnnnnnnnnnnnnnnnnnnnnnnnnnnnnnnnnnnnnnnnnnnnnnnnnnnnnnnnnnnnnnnnnnnnnnnnnnnnnnnnnnnnnnnnnnnnnnnnnnnnnnnnnnnnnnnnnnnnnnnnnnnnnnnnnnnnnnnnnnnnnnnnnnnnnnnnnnnnnnnnnnnnnnnnnnnnnnnnnnnnnnnnnnnnnnnnnnnnnnnnnnnnnnnnnnnnnnnnnnnnnnnnnnnnnnnnnnnnnnnnnnnnnnnnnnnnnnnnnnnnnnnnnnnnnnnnnnnnnnnnnnnnnnnnnnnnnnnnnnnnnnnnnnnnnnnnnnnnnnnnnnnnnnnnnnnnnnnnnnnnnnnnnnnnnnnnnnnnnnnnnnnnnnnnnnnnnnnnnnnnnnnnnnnnnnnnnnnnnnnnnnnnnnnnnnnnnnnnnnnnnnnnnnnnnnnnnnnnnnnnnnnnnnnnnnnnnnnnnnnnnnnnnnnnnnnnnnnnnnnnnnnnnnnnnnnnnnnnnnnnnnnnnnnnnnnnnnnnnnnnnnnnnnnnnnnnnnnnnnnnnnnnnnnnnnnnnnnnnnnnnnnnnnnnnnnnnnnnnnnnnnnnnnnnnnnnnnnnnnnnnnnnnnnnnnnnnnnnnnnnnnnnnnnnnnnnnnnnnnnnnnnnnnnnnnnnnnnnnnnnnnnnnnnnnnnnnnnnnnnnnnnnnnnnnnnnnnnnnnnnnnnnnnnnnnnnnnnnnnnnnnnnnnnnnnnnnnnnnnnnnnnnnnnnnnnnnnnnnnnnnnnnnnnnnnnnnnnnnnnnnnnnnnnnnnnnnnnnnnnnnnnnnnnnnnnnnnnnnnnnnnnnnnnnnnnnnnnnnnnnnnnnnnnnnnnnnnnnnnnnnnnnnnnnnnnnnnnnnnnnnnnnnnnnnnnnnnnnnnnnnnnnnnnnnnnnnnnnnnnnnnnnnnnnnnnnnnnnnnnnnnnnnnnnnnnnnnnnnnnnnnnnnnnnnncttctaggacttctacctatatcttataaataatccttaaaatatctactaagatagtatactagaatatagtactctatagtagaagtaatattaatctatacagatatttataatatagctcgatactatctatcgttatctaaagtacctatatagttaatagtactagaaggagtacctctaggccaaagtaatcgatatagtttatactaagtcgttaaaatggcctataaagctagaaatgtataaagtatatatcggatacctttctatagtagaaagtcaaatccccaactagtagaaatcgctttatatatagaaagagaaaagcgctagcggcagtaagaacgatactactaaattagatctaagcctagatactagtcttagctcttataccttatttatattaagaacaaagaaacgtaaggataggtttaaaactaaaggtaaggataagtagggcaataaacctaataagaagcgtaagtataataaataaaaaataaatcctaatagtattccctataataattactttaagtatagaaagctaggctactatatagatacctgtaaagagactaaaggggatttataattaaaaaactgattgccctagcgcttatagtatcggtagtattagggcttaacggtattaagtataagttaaaacttactttcgcttataaagttagtattaaaaccaataatagggagtaaactgtgtaggccctaattaatagtagagctgaaaagacctttataagctagaactaggttaaatagtaccttctatatannnnnnnnnnnnnnnnnnnnnnnnnnnnnnnnnnnnnnnnnnnnnnnnnnnnnnnnnnnnnnnnnnnnnnnnnnnnnnnnnnnnnnnnnnnnnnnnnnnnnnnnnnnnnnnnnnnnnnnnnnnnnnnnnnnnnnnnnnnnnnnnnnnnnnnnnnnnnnnnnnnnnnnnnnnnnnnnnnnnnnnnnnnnnnnnnnnnnnnnnnnnnnnnnnnnnnnnnnnnnnnnnnnnnnnnnnnnnnnnnnnnnnnnnnnnnnnnnnnnnnnnnnnnnnnnnnnnnnnnnnnnnnnnnnnnnnnnnnnnnnnnnnnnnnnnnnnnnnnnnnnnnnnnnnnnnnnnnnnnnnnnnnnnnnnnnnnnnnnnnnnnnnnnnnnnnnnnnnnnnnnnnnnnnnnnnnnnnnnnnnnnnnnnnnnnnnnnnnnnnnnnnnnnnnnnnnnnnnnnnnnnnnnnnnnnnnnnnnnnnnnnnnnnnnnnnnnnnnnnnnnnnnnnnnnnnnnnnnnnnnnnnnnnnnnnnnnnnnnnnnnnnnnnnnnnnnnnnnnnnnnnnnnnnnnnnnnnnnnnnnnnnnnnnnnnnnnnnnnnnnnnnnnnnnnnnnnnnnnnnnnnnnnnnnnnnnnnnnnnnnnnnnnnnnnnnnnnnnnnnnnnnnnnnnnnnnnnnnnnnnnnnnnnnnnnnnnnnnnnnnnnnnnnnnnnnnnnnnnnnnnnnnnnnnnnnnnnnnnnnnnnnnnnnnnnnnnnnnnnnnnnnnnnnnnnnnnnnnnnnnnnnnnnnnnnnnnnnnnnnnnnnnnnnnnnnnnnnnnnnnnnnnnnnnnnnnnnnnnnnnnnnnnnnnnnnnnnnnnnnnnnnnnnnnnnnnnnnnnnnnnnnnnnnnnnnnnnnnnnnnnnnnnnnnnnnnnnnnnnnnnnnnnnnnnnnnnnnnnnnnnnnnnnnnnnnnnnnnnnnnnnnnnnnnnnnnnnnnnnnnnnnnnnnnnnnnnnnnnnnnnnnnnnnnnnnnnnnnnnnnnnnnnnnnnnnnnnnnnnnnnnnnnnnnnnnnnnnnnnnnnnnnnnnnnnnnnnnnnnnnnnnnnnnnnnnnnnnnnnnnnnnnnnnnnnnnnnnnnnnnnnnnnnnnnnnnnnnnnnnnnnnnnnnnnnnnnnnnnnnnnnnnnnnnnnnnnnnnnnnnnnnnnnnnnnnnnnnnnnnnnnnnnnnnnnnnnnnnnnnnnnnnnnnnnnnnnnnnnnnnnnnnnnnnnnnnnnnnnnnnnnnnnnnnnnnnnnnnnnnnnnnnnnnnnnnnnnnnnnnnnnnnnnnnnnnnnnnnnnnnnnnnnnnnnnnnnnnnnnnnnnnnnnnnnnnnnnnnnnnnnnnnnnnnnnnnnnnnnnnnnnnnnnnnnnnnnnnnnnnnnnnnnnnnnnnnnnnnnnnnnnnnnnnnnnnnnnnnnnnnnnnnnnnnnnnnnnnnnnnnnnnnnnnnnnnnnnnnnnnnnnnnnnnnnnnnnnnnnnnnnnnnnnnnnnnnnnnnnnnnnnnnnnnnnnnnnnnnnnnnnnnnnnnnnnnnnnnnnnnnnnnnnnnnnnnnnnnnnnnnnnnnnnnnnnnnnnnnnnnnnnnnnnnnnnnnnnnnnnnnnnnnnnnnnnnnnnnnnnnnnnnnnnnnnnnnnnnnnnnnnnnnnnnnnnnnnnnnnnnnnnnnnnnnnnnnnnnnnnnnnnnnnnnnnnnnnnnnnnnnnnnnnnnnnnnnnnnnnnnnnnnnnnnnnnnnnnnnnnnnnnnnnnnnnnnnnnnnnnnnnnnnnnnnnnnnnnnnnnnnnnnnnnnnnnnnnnnnnnnnnnnnnnnnnnnnnnnnnnnnnnnnnnnnnnnnnnnnnnnnnnnnnnnnnnnnnnnnnnnnnnnnnnnnnnnnnnnnnnnnnnnnnnnnnnnnnnnnnnnnnnnnnnnnnnnnnnnnnnnnnnnnnnnnnnnnnnnnnnnnnnnnnnnnnnnnnnnnnnnnnnnnnnnnnnnnnnnnnnnnnnnnnnnnnnnnnnnnnnnnnnnnnnnnnnnnnnnnnnnnnnnnnnnnnnnnnnnnnnnnnnnnnnnnnnnnnnnnnnnnnnnnnnnnnnnnnnnnnnnnnnnnnnnnnnnnnnnnnnnnnnnnnnnnnnnnnnnnnnnnnnnnnnnnnnnnnnnnnnnnnnnnnnnnnnnnnnnnnnnnnnnnnnnnnnnnnnnnnnnnnnnnnnnnnnnnnnnnnnnnnnnnnnnnnnnnnnnnnnnnnnnnnnnnnnnnnnnnnnnnnnnnnnnnnnnnnnnnnnnnnnnnnnnnnnnnnnnnnnnnnnnnnnnnnnnnnnnnnnnnnnnnnnnnnnnnnnnnnnnnnnnnnnnnnnnnnnnnnnnnnnnnnnnnnnnnnnnnnnnnnnnnnnnnnnnnnnnnnnnnnnnnnnnnnnnnnnnnnnnnnnnnnnnnnnnnnnnnnnnnnnnnnnnnnnnnnnnnnnnnnnnnnnnnnnnnnnnnnnnnnnnnnnnnnnnnnnnnnnnnnnnnnnnnnnnnnnnnnnnnnnnnnnnnnnnnnnnnnnnnnnnnnnnnnnnnnnnnnnnnnnnnnnnnnnnnnnnnnnnnnnnnnnnnnnnnnnnnnnnnnnnnnnnnnnnnnnnnnnnnnnnnnnnnnnnnnnnnnnnnnnnnnnnnnnnnnnnnnnnnnnnnnnnnnnnnnnnnnnnnnnnnnnnnnnnnnnnnnnnnnnnnnnnnnnnnnnnnnnnnnnnnnnnnnnnnnnnnnnnnnnnnnnnnnnnnnnnnnnnnnnnnnnnnnnnnnnnnnnnnnnnnnnnnnnnnnnnnnnnnnnnnnnnnnnnnnnnnnnnnnnnnnnnnnnnnnnnnnnnnnnnnnnnnnnnnnnnnnnnnnnnnnnnnnnnnnnnnnnnnnnnnnnnnnnnnnnnnnnnnnnnnnnnnnnnnnnnnnnnnnnnnnnnnnnnnnnnnnnnnnnnnnnnnnnnnnnnnnnnnnnnnnnnnnnnnnnnnnnnnnnnnnnnnnnnnnnnnnnnnnnnnnnnnnnnnnnnnnnnnnnnnnnnnnnnnnnnnnnnnnnnnnnnnnnnnnnnnnnnnnnnnnnnnnnnnnnnnnnnnnnnnnnnnnnnnnnnnnnnnnnnnnnnnnnnnnnnnnnnnnnnnnnnnnnnnnnnnnnnnnnnnnnnnnnnnnnnnnnnnnnnnnnnnnnnnnnnnnnnnnnnnnnnnnnnnnnnnnnnnnnnnnnnnnnnnnnnnnnnnnnnnnnnnnnnnnnnnnnnnnnnnnnnnnnnnnnnnnnnnnnnnnnnnnnnnnnnnnnnnnnnnnnnnnnnnnnnnnnnnnnnnnnnnnnnnnnnnnnnnnnnnnnnnnnnnnnnnnnnnnnnnnnnnnnnnnnnnnnnnnnnnnnnnnnnnnnnnnnnnnnnnnnnnnnnnnnnnnnnnnnnnnnnnnnnnnnnnnnnnnnnnnnnnnnnnnnnnnnnnnnnnnnnnnnnnnnnnnnnnnnnnnnnnnnnnnnnnnnnnnnnnnnnnnnnnnnnnnnnnnnnnnnnnnnnnnnnnnnnnnnnnnnnnnnnnnnnnnnnnnnnnnnnnnnnnnnnnnnnnnnnnnnnnnnnnnnnnnnnnnnnnnnnnnnnnnnnnnnnnnnnnnnnnnnnnnnnnnnnnnnnnnnnnnnnnnnnnnnnnnnnnnnnnnnnnnnnnnnnnnnnnnnnnnnnnnnnnnnnnnnnnnnnnnnnnnnnnnnnnnnnnnnnnnnnnnnnnnnnnnnnnnnnnnnnnnnnnnnnnnnnnnnnnnnnnnnnnnnnnnnnnnnnnnnnnnnnnnnnnnnnnnnnnnnnnnnnnnnnnnnnnnnnnnnnnnnnnnnnnnnnnnnnnnnnnnnnnnnnnnnnnnnnnnnnnnnnnnnnnnnnnnnnnnnnnnnnnnnnnnnnnnnnnnnnnnnnnnnnnnnnnnnnnnnnnnnnnnnnnnnnnnnnnnnnnnnnnnnnnnnnnnnnnnnnnnnnnnnnnnnnnnnnnnnnnnnnnnnnnnnnnnnnnnnnnnnnnnnnnnnnnnnnnnnnnnnnnnnnnnnnnnnnnnnnnnnnnnnnnnnnnnnnnnnnnnnnnnnnnnnnnnnnnnnnnnnnnnnnnnnnnnnnnnnnnnnnnnnnnnnnnnnnnnnnnnnnnnnnnnnnnnnnnnnnnnnnnnnnnnnnnnnnnnnnnnnnnnnnnnnnnnnnnnnnnnnnnnnnnnnnnnnnnnnnnnnnnnnnnnnnnnnnnnnnnnnnnnnnnnnnnnnnnnnnnnnnnnnnnnnnnnnnnnnnnnnnnnnnnnnnnnnnnnnnnnnnnnnnnnnnnnnnnnnnnnnnnnnnnnnnnnnnnnnnnnnnnnnnnnnnnnnnnnnnnnnnnnnnnnnnnnnnnnnnnnnnnnnnnnnnnnnnnnnnnnnnnnnnnnnnnnnnnnnnnnnnnnnnnnnnnnnnnnnnnnnnnnnnnnnnnnnnnnnnnnnnnnnnnnnnnnnnnnnnnnnnnnnnnnnnnnnnnnnnnnnnnnnnnnnnnnnnnnnnnnnnnnnnnnnnnnnnnnnnnnnnnnnnnnnnnnnnnnnnnnnnnnnnnnnnnnnnnnnnnnnnnnnnnnnnnnnnnnnnnnnnnnnnnnnnnnnnnnnnnnnnnnnnnnnnnnnnnnnnnnnnnnnnnnnnnnnnnnnnnnnnnnnnnnnnnnnnnnnnnnnnnnnnnnnnnnnnnnnnnnnnnnnnnnnnnnnnnnnnnnnnnnnnnnnnnnnnnnnnnnnnnnnnnnnnnnnnnnnnnnnnnnnnnnnnnnnnnnnnnnnnnnnnnnnnnnnnnnnnnnnnnnnnnnnnnnnnnnnnnnnnnnnnnnnnnnnnnnnnnnnnnnnnnnnnnnnnnnnnnnnnnnnnnnnnnnnnnnnnnnnnnnnnnnnnnnnnnnnnnnnnnnnnnnnnnnnnnnnnnnnnnnnnnnnnnnnnnnnnnnnnnnnnnnnnnnnnnnnnnnnnnnnnnnnnnnnnnnnnnnnnnnnnnnnnnnnnnnnnnnnnnnnnnnnnnnnnnnnnnnnnnnnnnnnnnnnnnnnnnnnnnnnnnnnnnnnnnnnnnnnnnnnnnnnnnnnnnnnnnnnnnnnnnnnnnnnnnnnnnnnnnnnnnnnnnnnnnnnnnnnnnnnnnnnnnnnnnnnnnnnnnnnnnnnnnnnnnnnnnnnnnnnnnnnnnnnnnnnnnnnnnnnnnnnnnnnnnnnnnnnnnnnnnnnnnnnnnnnnnnnnnnnnnnnnnnnnnnnnnnnnnnnnnnnnnnnnnnnnnnnnnnnnnnnnnnnnnnnnnnnnnnnnnnnnnnnnnnnnnnnnnnnnnnnnnnnnnnnnnnnnnnnnnnnnnnnnnnnnnnnnnnnnnnnnnnnnnnnnnnnnnnnnnnnnnnnnnnnnnnnnnnnnnnnnnnnnnnnnnnnnnnnnnnnnnnnnnnnnnnnnnnnnnnnnnnnnnnnnnnnnnnnnnnnnnnnnnnnnnnnnnnnnnnnnnnnnnnnnnnnnnnnnnnnnnnnnnnnnnnnnnnnnnnnnnnnnnnnnnnnnnnnnnnnnnnnnnnnnnnnnnnnnnnnnnnnnnnnnnnnnnnnnnnnnnnnnnnnnnnnnnnnnnnnnnnnnnnnnnnnnnnnnnnnnnnnnnnnnnnnnnnnnnnnnnnnnnnnnnnnnnnnnnnnnnnnnnnnnnnnnnnnnnnnnnnnnnnnnnnnnnnnnnnnnnnnnnnnnnnnnnnnnnnnnnnnnnnnnnnnnnnnnnnnnnnnnnnnnnnnnnnnnnnnnnnnnnnnnnnnnnnnnnnnnnnnnnnnnnnnnnnnnnnnnnnnnnnnnnnnnnnnnnnnnnnnnnnnnnnnnnnnnnnnnnnnnnnnnnnnnnnnnnnnnnnnnnnnnnnnnnnnnnnnnnnnnnnnnnnnnnnnnnnnnnnnnnnnnnnnnnnnnnnnnnnnnnnnnnnnnnnnnnnnnnnnnnnnnnnnnnnnnnnnnnnnnnnnnnnnnnnnnnnnnnnnnnnnnnnnnnnnnnnnnnnnnnnnnnnnnnnnnnnnnnnnnnnnnnnnnnnnnnnnnnnnnnnnnnnnnnnnnnnnnnnnnnnnnnnnnnnnnnnnnnnnnnnnnnnnnnnnnnnnnnnnnnnnnnnnnnnnnnnnnnnnnnnnnnnnnnnnnnnnnnnnnnnnnnnnnnnnnnnnnnnnnnnnnnnnnnnnnnnnnnnnnnnnnnnnnnnnnnnnnnnnnnnnnnnnnnnnnnnnnnnnnnnnnnnnnnnnnnnnnnnnnnnnnnnnnnnnnnnnnnnnnnnnnnnnnnnnnnnnnnnnnnnnnnnnnnnnnnnnnnnnnnnnnnnnnnnnnnnnnnnnnnnnnnnnnnnnnnnnnnnnnnnnnnnnnnnnnnnnnnnnnnnnnnnnnnnnnnnnnnnnnnnnnnnnnnnnnnnnnnnnnnnnnnnnnnnnnnnnnnnnnnnnnnnnnnnnnnnnnnnnnnnnnnnnnnnnnnnnnnnnnnnnnnnnnnnnnnnnnnnnnnnnnnnnnnnnnnnnnnnnnnnnnnnnnnnnnnnnnnnnnnnnnnnnnnnnnnnnnnnnnnnnnnnnnnnnnnnnnnnnnnnnnnnnnnnnnnnnnnnnnnnnnnnnnnnnnnnnnnnnnnnnnnnnnnnnnnnnnnnnnnnnnnnnnnnnnnnnnnnnnnnnnnnnnnnnnnnnnnnnnnnnnnnnnnnnnnnnnnnnnnnnnnnnnnnnnnnnnnnnnnnnnnnnnnnnnnnnnnnnnnnnnnnnnnnnnnnnnnnnnnnnnnnnnnnnnnnnnnnnnnnnnnnnnnnnnnnnnnnnnnnnnnnnnnnnnnnnnnnnnnnnnnnnnnnnnnnnnnnnnnnnnnnnnnnnnnnnnnnnnnnnnnnnnnnnnnnnnnnnnnnnnnnnnnnnnnnnnnnnnnnnnnnnnnnnnnnnnnnnnnnnnnnnnnnnnnnnnnnnnnnnnnnnnnnnnnnnnnnnnnnnnnnnnnnnnnnnnnnnnnnnnnnnnnnnnnnnnnnnnnnnnnnnnnnnnnnnnnnnnnnnnnnnnnnnnnnnnnnnnnnnnnnnnnnnnnnnnnnnnnnnnnnnnnnnnnnnnnnnnnnnnnnnnnnnnnnnnnnnnnnnnnnnnnnnnnnnnnnnnnnnnnnnnnnnnnnnnnnnnnnnnnnnnnnnnnnnnnnnnnnnnnnnnnnnnnnnnnnnnnnnnnnnnnnnnnnnnnnnnnnnnnnnnnnnnnnnnnnnnnnnnnnnnnnnnnnnnnnnnnnnnnnnnnnnnnnnnnnnnnnnnnnnnnnnnnnnnnnnnnnnnnnnnnnnnnnnnnnnnnnnnnnnnnnnnnnnnnnnnnnnnnnnnnnnnnnnnnnnnnnnnnnnnnnnnnnnnnnnnnnnnnnnnnnnnnnnnnnnnnnnnnnnnnnnnnnnnnnnnnnnnnnnnnnnnnnnnnnnnnnnnnnnnnnnnnnnnnnnnnnnnnnnnnnnnnnnnnnnnnnnnnnnnnnnnnnnnnnnnnnnnnnnnnnnnnnnnnnnnnnnnnnnnnnnnnnnnnnnnnnnnnnnnnnnnnnnnnnnnnnnnnnnnnnnnnnnnnnnnnnnnnnnnnnnnnnnnnnnnnnnnnnnnnnnnnnnnnnnnnnnnnnnnnnnnnnnnnnnnnnnnnnnnnnnnnnnnnnnnnnnnnnnnnnnnnnnnnnnnnnnnnnnnnnnnnnnnnnnnnnnnnnnnnnnnnnnnnnnnnnnnnnnnnnnnnnnnnnnnnnnnnnnnnnnnnnnnnnnnnnnnnnnnnnnnnnnnnnnnnnnnnnnnnnnnnnnnnnnnnnnnnnnnnnnnnnnnnnnnnnnnnnnnnnnnnnnnnnnnnnnnnnnnnnnnnnnnnnnnnnnnnnnnnnnnnnnnnnnnnnnnnnnnnnnnnnnnnnnnnnnnnnnnnnnnnnnnnnnnnnnnnnnnnnnnnnnnnnnnnnnnnnnnnnnnnnnnnnnnnnnnnnnnnnnnnnnnnnnnnnnnnnnnnnnnnnnnnnnnnnnnnnnnnnnnnnnnnnnnnnnnnnnnnnnnnnnnnnnnnnnnnnnnnnnnnnnnnnnnnnnnnnnnnnnnnnnnnnnnnnnnnnnnnnnnnnnnnnnnnnnnnnnnnnnnnnnnnnnnnnnnnnnnnnnnnnnnnnnnnnnnnnnnnnnnnnnnnnnnnnnnnnnnnnnnnnnnnnnnnnnnnnnnnnnnnnnnnnnnnnnnnnnnnnnnnnnnnnnnnnnnnnnnnnnnnnnnnnnnnnnnnnnnnnnnnnnnnnnnnnnnnnnnnnnnnnnnnnnnnnnnnnnnnnnnnnnnnnnnnnnnnnnnnnnnnnnnnnnnnnnnnnnnnnnnnnnnnnnnnnnnnnnnnnnnnnnnnnnnnnnnnnnnnnnnnnnnnnnnnnnnnnnnnnnnnnnnnnnnnnnnnnnnnnnnnnnnnnnnnnnnnnnnnnnnnnnnnnnnnnnnnnnnnnnnnnnnnnnnnnnnnnnnnnnnnnnnnnnnnnnnnnnnnnnnnnnnnnnnnnnnnnnnnnnnnnnnnnnnnnnnnnnnnnnnnnnnnnnnnnnnnnnnnnnnnnnnnnnnnnnnnnnnnnnnnnnnnnnnnnnnnnnnnnnnnnnnnnnnnnnnnnnnnnnnnnnnnnnnnnnnnnnnnnnnnnnnnnnnnnnnnnnnnnnnnnnnnnnnnnnnnnnnnnnnnnnnnnnnnnnnnnnnnnnnnnnnnnnnnnnnnnnnnnnnnnnnnnnnnnnnnnnnnnnnnnnnnnnnnnnnnnnnnnnnnnnnnnnnnnnnnnnnnnnnnnnnnnnnnnnnnnnnnnnnnnnnnnnnnnnnnnnnnnnnnnnnnnnnnnnnnnnnnnnnnnnnnnnnnnnnnnnnnnnnnnnnnnnnnnnnnnnnnnnnnnnnnnnnnnnnnnnnnnnnnnnnnnnnnnnnnnnnnnnnnnnnnnnnnnnnnnnnnnnnnnnnnnnnnnnnnnnnnnnnnnnnnnnnnnnnnnnnnnnnnnnnnnnnnnnnnnnnnnnnnnnnnnnnnnnnnnnnnnnnnnnnnnnnnnnnnnnnnnnnnnnnnnnnnnnnnnnnnnnnnnnnnnnnnnnnnnnnnnnnnnnnnnnnnnnnnnnnnnnnnnnnnnnnnnnnnnnnnnnnnnnnnnnnnnnnnnnnnnnnnnnnnnnnnnnnnnnnnnnnnnnnnnnnnnnnnnnnnnnnnnnnnnnnnnnnnnnnnnnnnnnnnnnnnnnnnnnnnnnnnnnnnnnnnnnnnnnnnnnnnnnnnnnnnnnnnnnnnnnnnnnnnnnnnnnnnnnnnnnnnnnnnnnnnnnnnnnnnnnnnnnnnnnnnnnnnnnnnnnnnnnnnnnnnnnnnnnnnnnnnnnnnnnnnnnnnnnnnnnnnnnnnnnnnnnnnnnnnnnnnnnnnnnnnnnnnnnnnnnnnnnnnnnnnnnnnnnnnnnnnnnnnnnnnnnnnnnnnnnnnnnnnnnnnnnnnnnnnnnnnnnnnnnnnnnnnnnnnnnnnnnnnnnnnnnnnnnnnnnnnnnnnnnnnnnnnnnnnnnnnnnnnnnnnnnnnnnnnnnnnnnnnnnnnnnnnnnnnnnnnnnnnnnnnnnnnnnnnnnnnnnnnnnnnnnnnnnnnnnnnnnnnnnnnnnnnnnnnnnnnnnnnnnnnnnnnnnnnnnnnnnnnnnnnnnnnnnnnnnnnnnnnnnnnnnnnnnnnnnnnnnnnnnnnnnnnnnnnnnnnnnnnnnnnnnnnnnnnnnnnnnnnnnnnnnnnnnnnnnnnnnnnnnnnnnnnnnnnnnnnnnnnnnnnnnnnnnnnnnnnnnnnnnnnnnnnnnnnnnnnnnnnnnnnnnnnnnnnnnnnnnnnnnnnnnnnnnnnnnnnnnnnnnnnnnnnnnnnnnnnnnnnnnnnnnnnnnnnnnnnnnnnnnnnnnnnnnnnnnnnnnnnnnnnnnnnnnnnnnnnnnnnnnnnnnnnnnnnnnnnnnnnnnnnnnnnnnnnnnnnnnnnnnnnnnnnnnnnnnnnnnnnnnnnnnnnnnnnnnnnnnnnnnnnnnnnnnnnnnnnnnnnnnnnnnnnnnnnnnnnnnnnnnnnnnnnnnnnnnnnnnnnnnnnnnnnnnnnnnnnnnnnnnnnnnnnnnnnnnnnnnnnnnnnnnnnnnnnnnnnnnnnnnnnnnnnnnnnnnnnnnnnnnnnnnnnnnnnnnnnnnnnnnnnnnnnnnnnnnnnnnnnnnnnnnnnnnnnnnnnnnnnnnnnnnnnnnnnnnnnnnnnnnnnnnnnnnnnnnnnnnnnnnnnnnnnnnnnnnnnnnnnnnnnnnnnnnnnnnnnnnnnnnnnnnnnnnnnnnnnnnnnnnnnnnnnnnnnnnnnnnnnnnnnnnnnnnnnnnnnnnnnnnnnnnnnnnnnnnnnnnnnnnnnnnnnnnnnnnnnnnnnnnnnnnnnnnnnnnnnnnnnnnnnnnnnnnnnnnnnnnnnnnnnnnnnnnnnnnnnnnnnnnnnnnnnnnnnnnnnnnnnnnnnnnnnnnnnnnnnnnnnnnnnnnnnnnnnnnnnnnnnnnnnnnnnnnnnnnnnnnnnnnnnnnnnnnnnnnnnnnnnnnnnnnnnnnnnnnnnnnnnnnnnnnnnnnnnnnnnnnnnnnnnnnnnnnnnnnnnnnnnnnnnnnnnnnnnnnnnnnnnnnnnnnnnnnnnnnnnnnnnnnnnnnnnnnnnnnnnnnnnnnnnnnnnnnnnnnnnnnnnnnnnnnnnnnnnnnnnnnnnnnnnnnnnnnnnnnnnnnnnnnnnnnnnnnnnnnnnnnnnnnnnnnnnnnnnnnnnnnnnnnnnnnnnnnnnnnnnnnnnnnnnnnnnnnnnnnnnnnnnnnnnnnnnnnnnnnnnnnnnnnnnnnnnnnnnnnnnnnnnnnnnnnnnnnnnnnnnnnnnnnnnnnnnnnnnnnnnnnnnnnnnnnnnnnnnnnnnnnnnnnnnnnnnnnnnnnnnnnnnnnnnnnnnnnnnnnnnnnnnnnnnnnnnnnnnnnnnnnnnnnnnnnnnnnnnnnnnnnnnnnnnnnnnnnnnnnnnnnnnnnnnnnnnnnnnnnnnnnnnnnnnnnnnnnnnnnnnnnnnnnnnnnnnnnnnnnnnnnnnnnnnnnnnnnnnnnnnnnnnnnnnnnnnnnnnnnnnnnnnnnnnnnnnnnnnnnnnnnnnnnnnnnnnnnnnnnnnnnnnnnnnnnnnnnnnnnnnnnnnnnnnnnnnnnnnnnnnnnnnnnnnnnnnnnnnnnnnnnnnnnnnnnnnnnnnnnnnnnnnnnnnnnnnnnnnnnnnnnnnnnnnnnnnnnnnnnnnnnnnnnnnnnnnnnnnnnnnnnnnnnnnnnnnnnnnnnnnnnnnnnnnnnnnnnnnnnnnnnnnnnnnnnnnnnnnnnnnnnnnnnnnnnnnnnnnnnnnnnnnnnnnnnnnnnnnnnnnnnnnnnnnnnnnnnnnnnnnnnnnnnnnnnnnnnnnnnnnnnnnnnnnnnnnnnnnnnnnnnnnnnnnnnnnnnnnnnnnnnnnnnnnnnnnnnnnnnnnnnnnnnnnnnnnnnnnnnnnnnnnnnnnnnnnnnnnnnnnnnnnnnnnnnnnnnnnnnnnnnnnnnnnnnnnnnnnnnnnnnnnnnnnnnnnnnnnnnnnnnnnnnnnnnnnnnnnnnnnnnnnnnnnnnnnnnnnnnnnnnnnnnnnnnnnnnnnnnnnnnnnnnnnnnnnnnnnnnnnnnnnnnnnnnnnnnnnnnnnnnnnnnnnnnnnnnnnnnnnnnnnnnnnnnnnnnnnnnnnnnnnnnnnnnnnnnnnnnnnnnnnnnnnnnnnnnnnnnnnnnnnnnnnnnnnnnnnnnnnnnnnnnnnnnnnnnnnnnnnnnnnnnnnnnnnnnnnnnnnnnnnnnnnnnnnnnnnnnnnnnnnnnnnnnnnnnnnnnnnnnnnnnnnnnnnnnnnnnnnnnnnnnnnnnnnnnnnnnnnnnnnnnnnnnnnnnnnnnnnnnnnnnnnnnnnnnnnnnnnnnnnnnnnnnnnnnnnnnnnnnnnnnnnnnnnnnnnnnnnnnnnnnnnnnnnnnnnnnnnnnnnnnnnnnnnnnnnnnnnnnnnnnnnnnnnnnnnnnnnnnnnnnnnnnnnnnnnnnnnnnnnnnnnnnnnnnnnnnnnnnnnnnnnnnnnnnnnnnnnnnnnnnnnnnnnnnnnnnnnnnnnnnnnnnnnnnnnnnnnnnnnnnnnnnnnnnnnnnnnnnnnnnnnnnnnnnnnnnnnnnnnnnnnnnnnnnnnnnnnnnnnnnnnnnnnnnnnnnnnnnnnnnnnnnnnnnnnnnnnnnnnnnnnnnnnnnnnnnnnnnnnnnnnnnnnnnnnnnnnnnnnnnnnnnnnnnnnnnnnnnnnnnnnnnnnnnnnnnnnnnnnnnnnnnnnnnnnnnnnnnnnnnnnnnnnnnnnnnnnnnnnnnnnnnnnnnnnnnnnnnnnnnnnnnnnnnnnnnnnnnnnnnnnnnnnnnnnnnnnnnnnnnnnnnnnnnnnnnnnnnnnnnnnnnnnnnnnnnnnnnnnnnnnnnnnnnnnnnnnnnnnnnnnnnnnnnnnnnnnnnnnnnnnnnnnnnnnnnnnnnnnnnnnnnnnnnnnnnnnnnnnnnnnnnnnnnnnnnnnnnnnnnnnnnnnnnnnnnnnnnnnnnnnnnnnnnnnnnnnnnnnnnnnnnnnnnnnnnnnnnnnnnnnnnnnnnnnnnnnnnnnnnnnnnnnnnnnnnnnnnnnnnnnnnnnnnnnnnnnnnnnnnnnnnnnnnnnnnnnnnnnnnnnnnnnnnnnnnnnnnnnnnnnnnnnnnnnnnnnnnnnnnnnnnnnnnnnnnnnnnnnnnnnnnnnnnnnnnnnnnnnnnnnnnnnnnnnnnnnnnnnnnnnnnnnnnnnnnnnnnnnnnnnnnnnnnnnnnnnnnnnnnnnnnnnnnnnnnnnnnnnnnnnnnnnnnnnnnnnnnnnnnnnnnnnnnnnnnnnnnnnnnnnnnnnnnnnnnnnnnnnnnnnnnnnnnnnnnnnnnnnnnnnnnnnnnnnnnnnnnnnnnnnnnnnnnnnnnnnnnnnnnnnnnnnnnnnnnnnnnnnnnnnnnnnnnnnnnnnnnnnnnnnnnnnnnnnnnnnnnnnnnnnnnnnnnnnnnnnnnnnnnnnnnnnnnnnnnnnnnnnnnnnnnnnnnnnnnnnnnnnnnnnnnnnnnnnnnnnnnnnnnnnnnnnnnnnnnnnnnnnnnnnnnnnnnnnnnnnnnnnnnnnnnnnnnnnnnnnnnnnnnnnnnnnnnnnnnnnnnnnnnnnnnnnnnnnnnnnnnnnnnnnnnnnnnnnnnnnnnnnnnnnnnnnnnnnnnnnnnnnnnnnnnnnnnnnnnnnnnnnnnnnnnnnnnnnnnnnnnnnnnnnnnnnnnnnnnnnnnnnnnnnnnnnnnnnnnnnnnnnnnnnnnnnnnnnnnnnnnnnnnnnnnnnnnnnnnnnnnnnnnnnnnnnnnnnnnnnnnnnnnnnnnnnnnnnnnnnnnnnnnnnnnnnnnnnnnnnnnnnnnnnnnnnnnnnnnnnnnnnnnnnnnnnnnnnnnnnnnnnnnnnnnnnnnnnnnnnnnnnnnnnnnnnnnnnnnnnnnnnnnnnnnnnnnnnnnnnnnnnnnnnnnnnnnnnnnnnnnnnnnnnnnnnnnnnnnnnnnnnnnnnnnnnnnnnnnnnnnnnnnnnnnnnnnnnnnnnnnnnnnnnnnnnnnnnnnnnnnnnnnnnnnnnnnnnnnnnnnnnnnnnnnnnnnnnnnnnnnnnnnnnnnnnnnnnnnnnnnnnnnnnnnnnnnnnnnnnnnnnnnnnnnnnnnnnnnnnnnnnnnnnnnnnnnnnnnnnnnnnnnnnnnnnnnnnnnnnnnnnnnnnnnnnnnnnnnnnnnnnnnnnnnnnnnnnnnnnnnnnnnnnnnnnnnnnnnnnnnnnnnnnnnnnnnnnnnnnnnnnnnnnnnnnnnnnnnnnnnnnnnnnnnnnnnnnnnnnnnnnnnnnnnnnnnnnnnnnnnnnnnnnnnnnnnnnnnnnnnnnnnnnnnnnnnnnnnnnnnnnnnnnnnnnnnnnnnnnnnnnnnnnnnnnnnnnnnnnnnnnnnnnnnnnnnnnnnnnnnnnnnnnnnnnnnnnnnnnnnnnnnnnnnnnnnnnnnnnnnnnnnnnnnnnnnnnnnnnnnnnnnnnnnnnnnnnnnnnnnnnnnnnnnnnnnnnnnnnnnnnnnnnnnnnnnnnnnnnnnnnnnnnnnnnnnnnnnnnnnnnnnnnnnnnnnnnnnnnnnnnnnnnnnnnnnnnnnnnnnnnnnnnnnnnnnnnnnnnnnnnnnnnnnnnnnnnnnnnnnnnnnnnnnnnnnnnnnnnnnnnnnnnnnnnnnnnnnnnnnnnnnnnnnnnnnnnnnnnnnnnnnnnnnnnnnnnnnnnnnnnnnnnnnnnnnnnnnnnnnnnnnnnnnnnnnnnnnnnnnnnnnnnnnnnnnnnnnnnnnnnnnnnnnnnnnnnnnnnnnnnnnnnnnnnnnnnnnnnnnnnnnnnnnnnnnnnnnnnnnnnnnnnnnnnnnnnnnnnnnnnnnnnnnnnnnnnnnnnnnnnnnnnnnnnnnnnnnnnnnnnnnnnnnnnnnnnnnnnnnnnnnnnnnnnnnnnnnnnnnnnnnnnnnnnnnnnnnnnnnnnnnnnnnnnnnnnnnnnnnnnnnnnnnnnnnnnnnnnnnnnnnnnnnnnnnnnnnnnnnnnnnnnnnnnnnnnnnnnnnnnnnnnnnnnnnnnnnnnnnnnnnnnnnnnnnnnnnnnnnnnnnnnnnnnnnnnnnnnnnnnnnnnnnnnnnnnnnnnnnnnnnnnnnnnnnnnnnnnnnnnnnnnnnnnnnnnnnnnnnnnnnnnnnnnnnnnnnnnnnnnnnnnnnnnnnnnnnnnnnnnnnnnnnnnnnnnnnnnnnnnnnnnnnnnnnnnnnnnnnnnnnnnnnnnnnnnnnnnnnnnnnnnnnnnnnnnnnnnnnnnnnnnnnnnnnnnnnnnnnnnnnnnnnnnnnnnnnnnnnnnnnnnnnnnnnnnnnnnnnnnnnnnnnnnnnnnnnnnnnnnnnnnnnnnnnnnnnnnnnnnnnnnnnnnnnnnnnnnnnnnnnnnnnnnnnnnnnnnnnnnnnnnnnnnnnnnnnnnnnnnnnnnnnnnnnnnnnnnnnnnnnnnnnnnnnnnnnnnnnnnnnnnnnnnnnnnnnnnnnnnnnnnnnnnnnnnnnnnnnnnnnnnnnnnnnnnnnnnnnnnnnnnnnnnnnnnnnnnnnnnnnnnnnnnnnnnnnnnnnnnnnnnnnnnnnnnnnnnnnnnnnnnnnnnnnnnnnnnnnnnnnnnnnnnnnnnnnnnnnnnnnnnnnnnnnnnnnnnnnnnnnnnnnnnnnnnnnnnnnnnnnnnnnnnnnnnnnnnnnnnnnnnnnnnnnnnnnnnnnnnnnnnnnnnnnnnnnnnnnnnnnnnnnnnnnnnnnnnnnnnnnnnnnnnnnnnnnnnnnnnnnnnnnnnnnnnnnnnnnnnnnnnnnnnnnnnnnnnnnnnnnnnnnnnnnnnnnnnnnnnnnnnnnnnnnnnnnnnnnnnnnnnnnnnnnnnnnnnnnnnnnnnnnnnnnnnnnnnnnnnnnnnnnnnnnnnnnnnnnnnnnnnnnnnnnnnnnnnnnnnnnnnnnnnnnnnnnnnnnnnnnnnnnnnnnnnnnnnnnnnnnnnnnnnnnnnnnnnnnnnnnnnnnnnnnnnnnnnnnnnnnnnnnnnnnnnnnnnnnnnnnnnnnnnnnnnnnnnnnnnnnnnnnnnnnnnnnnnnnnnnnnnnnnnnnnnnnnnnnnnnnnnnnnnnnnnnnnnnnnnnnnnnnnnnnnnnnnnnnnnnnnnnnnnnnnnnnnnnnnnnnnnnnnnnnnnnnnnnnnnnnnnnnnnnnnnnnnnnnnnnnnnnnnnnnnnnnnnnnnnnnnnnnnnnnnnnnnnnnnnnnnnnnnnnnnnnnnnnnnnnnnnnnnnnnnnnnnnnnnnnnnnnnnnnnnnnnnnnnnnnnnnnnnnnnnnnnnnnnnnnnnnnnnnnnnnnnnnnnnnnnnnnnnnnnnnnnnnnnnnnnnnnnnnnnnnnnnnnnnnnnnnnnnnnnnnnnnnnnnnnnnnnnnnnnnnnnnnnnnnnnnnnnnnnnnnnnnnnnnnnnnnnnnnnnnnnnnnnnnnnnnnnnnnnnnnnnnnnnnnnnnnnnnnnnnnnnnnnnnnnnnnnnnnnnnnnnnnnnnnnnnnnnnnnnnnnnnnnnnnnnnnnnnnnnnnnnnnnnnnnnnnnnnnnnnnnnnnnnnnnnnnnnnnnnnnnnnnnnnnnnnnnnnnnnnnnnnnnnnnnnnnnnnnnnnnnnnnnnnnnnnnnnnnnnnnnnnnnnnnnnnnnnnnnnnnnnnnnnnnnnnnnnnnnnnnnnnnnnnnnnnnnnnnnnnnnnnnnnnnnnnnnnnnnnnnnnnnnnnnnnnnnnnnnnnnnnnnnnnnnnnnnnnnnnnnnnnnnnnnnnnnnnnnnnnnnnnnnnnnnnnnnnnnnnnnnnnnnnnnnnnnnnnnnnnnnnnnnnnnnnnnnnnnnnnnnnnnnnnnnnnnnnnnnnnnnnnnnnnnnnnnnnnnnnnnnnnnnnnnnnnnnnnnnnnnnnnnnnnnnnnnnnnnnnnnnnnnnnnnnnnnnnnnnnnnnnnnnnnnnnnnnnnnnnnnnnnnnnnnnnnnnnnnnnnnnnnnnnnnnnnnnnnnnnnnnnnnnnnnnnnnnnnnnnnnnnnnnnnnnnnnnnnnnnnnnnnnnnnnnnnnnnnnnnnnnnnnnnnnnnnnnnnnnnnnnnnnnnnnnnnnnnnnnnnnnnnnnnnnnnnnnnnnnnnnnnnnnnnnnnnnnnnnnnnnnnnnnnnnnnnnnnnnnnnnnnnnnnnnnnnnnnnnnnnnnnnnnnnnnnnnnnnnnnnnnnnnnnnnnnnnnnnnnnnnnnnnnnnnnnnnnnnnnnnnnnnnnnnnnnnnnnnnnnnnnnnnnnnnnnnnnnnnnnnnnnnnnnnnnnnnnnnnnnnnnnnnnnnnnnnnnnnnnnnnnnnnnnnnnnnnnnnnnnnnnnnnnnnnnnnnnnnnnnnnnnnnnnnnnnnnnnnnnnnnnnnnnnnnnnnnnnnnnnnnnnnnnnnnnnnnnnnnnnnnnnnnnnnnnnnnnnnnnnnnnnnnnnnnnnnnnnnnnnnnnnnnnnnnnnnnnnnnnnnnnnnnnnnnnnnnnnnnnnnnnnnnnnnnnnnnnnnnnnnnnnnnnnnnnnnnnnnnnnnnnnnnnnnnnnnnnnnnnnnnnnnnnnnnnnnnnnnnnnnnnnnnnnnnnnnnnnnnnnnnnnnnnnnnnnnnnnnnnnnnnnnnnnnnnnnnnnnnnnnnnnnnnnnnnnnnnnnnnnnnnnnnnnnnnnnnnnnnnnnnnnnnnnnnnnnnnnnnnnnnnnnnnnnnnnnnnnnnnnnnnnnnnnnnnnnnnnnnnnnnnnnnnnnnnnnnnnnnnnnnnnnnnnnnnnnnnnnnnnnnnnnnnnnnnnnnnnnnnnnnnnnnnnnnnnnnnnnnnnnnnnnnnnnnnnnnnnnnnnnnnnnnnnnnnnnnnnnnnnnnnnnnnnnnnnnnnnnnnnnnnnnnnnnnnnnnnnnnnnnnnnnnnnnnnnnnnnnnnnnnnnnnnnnnnnnnnnnnnnnnnnnnnnnnnnnnnnnnnnnnnnnnnnnnnnnnnnnnnnnnnnnnnnnnnnnnnnnnnnnnnnnnnnnnnnnnnnnnnnnnnnnnnnnnnnnnnnnnnnnnnnnnnnnnnnnnnnnnnnnnnnnnnnnnnnnnnnnnnnnnnnnnnnnnnnnnnnnnnnnnnnnnnnnnnnnnnnnnnnnnnnnnnnnnnnnnnnnnnnnnnnnnnnnnnnnnnnnnnnnnnnnnnnnnnnnnnnnnnnnnnnnnnnnnnnnnnnnnnnnnnnnnnnnnnnnnnnnnnnnnnnnnnnnnnnnnnnnnnnnnnnnnnnnnnnnnnnnnnnnnnnnnnnnnnnnnnnnnnnnnnnnnnnnnnnnnnnnnnnnnnnnnnnnnnnnnnnnnnnnnnnnnnnnnnnnnnnnnnnnnnnnnnnnnnnnnnnnnnnnnnnnnnnnnnnnnnnnnnnnnnnnnnnnnnnnnnnnnnnnnnnnnnnnnnnnnnnnnnnnnnnnnnnnnnnnnnnnnnnnnnnnnnnnnnnnnnnnnnnnnnnnnnnnnnnnnnnnnnnnnnnnnnnnnnnnnnnnnnnnnnnnnnnnnnnnnnnnnnnnnnnnnnnnnnnnnnnnnnnnnnnnnnnnnnnnnnnnnnnnnnnnnnnnnnnnnnnnnnnnnnnnnnnnnnnnnnnnnnnnnnnnnnnnnnnnnnnnnnnnnnnnnnnnnnnnnnnnnnnnnnnnnnnnnnnnnnnnnnnnnnnnnnnnnnnnnnnnnnnnnnnnnnnnnnnnnnnnnnnnnnnnnnnnnnnnnnnnnnnnnnnnnnnnnnnnnnnnnnnnnnnnnnnnnnnnnnnnnnnnnnnnnnnnnnnnnnnnnnnnnnnnnnnnnnnnnnnnnnnnnnnnnnnnnnnnnnnnnnnnnnnnnnnnnnnnnnnnnnnnnnnnnnnnnnnnnnnnnnnnnnnnnnnnnnnnnnnnnnnnnnnnnnnnnnnnnnnnnnnnnnnnnnnnnnnnnnnnnnnnnnnnnnnnnnnnnnnnnnnnnnnnnnnnnnnnnnnnnnnnnnnnnnnnnnnnnnnnnnnnnnnnnnnnnnnnnnnnnnnnnnnnnnnnnnnnnnnnnnnnnnnnnnnnnnnnnnnnnnnnnnnnnnnnnnnnnnnnnnnnnnnnnnnnnnnnnnnnnnnnnnnnnnnnnnnnnnnnnnnnnnnnnnnnnnnnnnnnnnnnnnnnnnnnnnnnnnnnnnnnnnnnnnnnnnnnnnnnnnnnnnnnnnnnnnnnnnnnnnnnnnnnnnnnnnnnnnnnnnnnnnnnnnnnnnnnnnnnnnnnnnnnnnnnnnnnnnnnnnnnnnnnnnnnnnnnnnnnnnnnnnnnnnnnnnnnnnnnnnnnnnnnnnnnnnnnnnnnnnnnnnnnnnnnnnnnnnnnnnnnnnnnnnnnnnnnnnnnnnnnnnnnnnnnnnnnnnnnnnnnnnnnnnnnnnnnnnnnnnnnnnnnnnnnnnnnnnnnnnnnnnnnnnnnnnnnnnnnnnnnnnnnnnnnnnnnnnnnnnnnnnnnnnnnnnnnnnnnnnnnnnnnnnnnnnnnnnnnnnnnnnnnnnnnnnnnnnnnnnnnnnnnnnnnnnnnnnnnnnnnnnnnnnnnnnnnnnnnnnnnnnnnnnnnnnnnnnnnnnnnnnnnnnnnnnnnnnnnnnnnnnnnnnnnnnnnnnnnnnnnnnnnnnnnnnnnnnnnnnnnnnnnnnnnnnnnnnnnnnnnnnnnnnnnnnnnnnnnnnnnnnnnnnnnnnnnnnnnnnnnnnnnnnnnnnnnnnnnnnnnnnnnnnnnnnnnnnnnnnnnnnnnnnnnnnnnnnnnnnnnnnnnnnnnnnnnnnnnnnnnnnnnnnnnnnnnnnnnnnnnnnnnnnnnnnnnnnnnnnnnnnnnnnnnnnnnnnnnnnnnnnnnnnnnnnnnnnnnnnnnnnnnnnnnnnnnnnnnnnnnnnnnnnnnnnnnnnnnnnnnnnnnnnnnnnnnnnnnnnnnnnnnnnnnnnnnnnnnnnnnnnnnnnnnnnnnnnnnnnnnnnnnnnnnnnnnnnnnnnnnnnnnnnnnnnnnnnnnnnnnnnnnnnnnnnnnnnnnnnnnnnnnnnnnnnnnnnnnnnnnnnnnnnnnnnnnnnnnnnnnnnnnnnnnnnnnnnnnnnnnnnnnnnnnnnnnnnnnnnnnnnnnnnnnnnnnnnnnnnnnnnnnnnnnnnnnnnnnnnnnnnnnnnnnnnnnnnnnnnnnnnnnnnnnnnnnnnnnnnnnnnnnnnnnnnnnnnnnnnnnnnnnnnnnnnnnnnnnnnnnnnnnnnnnnnnnnnnnnnnnnnnnnnnnnnnnnnnnnnnnnnnnnnnnnnnnnnnnnnnnnnnnnnnnnnnnnnnnnnnnnnnnnnnnnnnnnnnnnnnnnnnnnnnnnnnnnnnnnnnnnnnnnnnnnnnnnnnnnnnnnnnnnnnnnnnnnnnnnnnnnnnnnnnnnnnnnnnnnnnnnnnnnnnnnnnnnnnnnnnnnnnnnnnnnnnnnnnnnnnnnnnnnnnnnnnnnnnnnnnnnnnnnnnnnnnnnnnnnnnnnnnnnnnnnnnnnnnnnnnnnnnnnnnnnnnnnnnnnnnnnnnnnnnnnnnnnnnnnnnnnnnnnnnnnnnnnnnnnnnnnnnnnnnnnnnnnnnnnnnnnnnnnnnnnnnnnnnnnnnnnnnnnnnnnnnnnnnnnnnnnnnnnnnnnnnnnnnnnnnnnnnnnnnnnnnnnnnnnnnnnnnnnnnnnnnnnnnnnnnnnnnnnnnnnnnnnnnnnnnnnnnnnnnnnnnnnnnnnnnnnnnnnnnnnnnnnnnnnnnnnnnnnnnnnnnnnnnnnnnnnnnnnnnnnnnnnnnnnnnnnnnnnnnnnnnnnnnnnnnnnnnnnnnnnnnnnnnnnnnnnnnnnnnnnnnnnnnnnnnnnnnnnnnnnnnnnnnnnnnnnnnnnnnnnnnnnnnnnnnnnnnnnnnnnnnnnnnnnnnnnnnnnnnnnnnnnnnnnnnnnnnnnnnnnnnnnnnnnnnnnnnnnnnnnnnnnnnnnnnnnnnnnnnnnnnnnnnnnnnnnnnnnnnnnnnnnnnnnnnnnnnnnnnnnnnnnnnnnnnnnnnnnnnnnnnnnnnnnnnnnnnnnnnnnnnnnnnnnnnnnnnnnnnnnnnnnnnnnnnnnnnnnnnnnnnnnnnnnnnnnnnnnnnnnnnnnnnnnnnnnnnnnnnnnnnnnnnnnnnnnnnnnnnnnnnnnnnnnnnnnnnnnnnnnnnnnnnnnnnnnnnnnnnnnnnnnnnnnnnnnnnnnnnnnnnnnnnnnnnnnnnnnnnnnnnnnnnnnnnnnnnnnnnnnnnnnnnnnnnnnnnnnnnnnnnnnnnnnnnnnnnnnnnnnnnnnnnnnnnnnnnnnnnnnnnnnnnnnnnnnnnnnnnnnnnnnnnnnnnnnnnnnnnnnnnnnnnnnnnnnnnnnnnnnnnnnnnnnnnnnnnnnnnnnnnnnnnnnnnnnnnnnnnnnnnnnnnnnnnnnnnnnnnnnnnnnnnnnnnnnnnnnnnnnnnnnnnnnnnnnnnnnnnnnnnnnnnnnnnnnnnnnnnnnnnnnnnnnnnnnnnnnnnnnnnnnnnnnnnnnnnnnnnnnnnnnnnnnnnnnnnnnnnnnnnnnnnnnnnnnnnnnnnnnnnnnnnnnnnnnnnnnnnnnnnnnnnnnnnnnnnnnnnnnnnnnnnnnnnnnnnnnnnnnnnnnnnnnnnnnnnnnnnnnnnnnnnnnnnnnnnnnnnnnnnnnnnnnnnnnnnnnnnnnnnnnnnnnnnnnnnnnnnnnnnnnnnnnnnnnnnnnnnnnnnnnnnnnnnnnnnnnnnnnnnnnnnnnnnnnnnnnnnnnnnnnnnnnnnnnnnnnnnnnnnnnnnnnnnnnnnnnnnnnnnnnnnnnnnnnnnnnnnnnnnnnnnnnnnnnnnnnnnnnnnnnnnnnnnnnnnnnnnnnnnnnnnnnnnnnnnnnnnnnnnnnnnnnnnnnnnnnnnnnnnnnnnnnnnnnnnnnnnnnnnnnnnnnnnnnnnnnnnnnnnnnnnnnnnnnnnnnnnnnnnnnnnnnnnnnnnnnnnnnnnnnnnnnnnnnnnnnnnnnnnnnnnnnnnnnnnnnnnnnnnnnnnnnnnnnnnnnnnnnnnnnnnnnnnnnnnnnnnnnnnnnnnnnnnnnnnnnnnnnnnnnnnnnnnnnnnnnnnnnnnnnnnnnnnnnnnnnnnnnnnnnnnnnnnnnnnnnnnnnnnnnnnnnnnnnnnnnnnnnnnnnnnnnnnnnnnnnnnnnnnnnnnnnnnnnnnnnnnnnnnnnnnnnnnnnnnnnnnnnnnnnnnnnnnnnnnnnnnnnnnnnnnnnnnnnnnnnnnnnnnnnnnnnnnnnnnnnnnnnnnnnnnnnnnnnnnnnnnnnnnnnnnnnnnnnnnnnnnnnnnnnnnnnnnnnnnnnnnnnnnnnnnnnnnnnnnnnnnnnnnnnnnnnnnnnnnnnnnnnnnnnnnnnnnnnnnnnnnnnnnnnnnnnnnnnnnnnnnnnnnnnnnnnnnnnnnnnnnnnnnnnnnnnnnnnnnnnnnnnnnnnnnnnnnnnnnnnnnnnnnnnnnnnnnnnnnnnnnnnnnnnnnnnnnnnnnnnnnnnnnnnnnnnnnnnnnnnnnnnnnnnnnnnnnnnnnnnnnnnnnnnnnnnnnnnnnnnnnnnnnnnnnnnnnnnnnnnnnnnnnnnnnnnnnnnnnnnnnnnnnnnnnnnnnnnnnnnnnnnnnnnnnnnnnnnnnnnnnnnnnnnnnnnnnnnnnnnnnnnnnnnnnnnnnnnnnnnnnnnnnnnnnnnnnnnnnnnnnnnnnnnnnnnnnnnnnnnnnnnnnnnnnnnnnnnnnnnnnnnnnnnnnnnnnnnnnnnnnnnnnnnnnnnnnnnnnnnnnnnnnnnnnnnnnnnnnnnnnnnnnnnnnnnnnnnnnnnnnnnnnnnnnnnnnnnnnnnnnnnnnnnnnnnnnnnnnnnnnnnnnnnnnnnnnnnnnnnnnnnnnnnnnnnnnnnnnnnnnnnnnnnnnnnnnnnnnnnnnnnnnnnnnnnnnnnnnnnnnnnnnnnnnnnnnnnnnnnnnnnnnnnnnnnnnnnnnnnnnnnnnnnnnnnnnnnnnnnnnnnnnnnnnnnnnnnnnnnnnnnnnnnnnnnnnnnnnnnnnnnnnnnnnnnnnnnnnnnnnnnnnnnnnnnnnnnnnnnnnnnnnnnnnnnnnnnnnnnnnnnnnnnnnnnnnnnnnnnnnnnnnnnnnnnnnnnnnnnnnnnnnnnnnnnnnnnnnnnnnnnnnnnnnnnnnnnnnnnnnnnnnnnnnnnnnnnnnnnnnnnnnnnnnnnnnnnnnnnnnnnnnnnnnnnnnnnnnnnnnnnnnnnnnnnnnnnnnnnnnnnnnnnnnnnnnnnnnnnnnnnnnnnnnnnnnnnnnnnnnnnnnnnnnnnnnnnnnnnnnnnnnnnnnnnnnnnnnnnnnnnnnnnnnnnnnnnnnnnnnnnnnnnnnnnnnnnnnnnnnnnnnnnnnnnnnnnnnnnnnnnnnnnnnnnnnnnnnnnnnnnnnnnnnnnnnnnnnnnnnnnnnnnnnnnnnnnnnnnnnnnnnnnnnnnnnnnnnnnnnnnnnnnnnnnnnnnnnnnnnnnnnnnnnnnnnnnnnnnnnnnnnnnnnnnnnnnnnnnnnnnnnnnnnnnnnnnnnnnnnnnnnnnnnnnnnnnnnnnnnnnnnnnnnnnnnnnnnnnnnnnnnnnnnnnnnnnnnnnnnnnnnnnnnnnnnnnnnnnnnnnnnnnnnnnnnnnnnnnnnnnnnnnnnnnnnnnnnnnnnnnnnnnnnnnnnnnnnnnnnnnnnnnnnnnnnnnnnnnnnnnnnnnnnnnnnnnnnnnnnnnnnnnnnnnnnnnnnnnnnnnnnnnnnnnnnnnnnnnnnnnnnnnnnnnnnnnnnnnnnnnnnnnnnnnnnnnnnnnnnnnnnnnnnnnnnnnnnnnnnnnnnnnnnnnnnnnnnnnnnnnnnnnnnnnnnnnnnnnnnnnnnnnnnnnnnnnnnnnnnnnnnnnnnnnnnnnnnnnnnnnnnnnnnnnnnnnnnnnnnnnnnnnnnnnnnnnnnnnnnnnnnnnnnnnnnnnnnnnnnnnnnnnnnnnnnnnnnnnnnnnnnnnnnnnnnnnnnnnnnnnnnnnnnnnnnnnnnnnnnnnnnnnnnnnnnnnnnnnnnnnnnnnnnnnnnnnnnnnnnnnnnnnnnnnnnnnnnnnnnnnnnnnnnnnnnnnnnnnnnnnnnnnnnnnnnnnnnnnnnnnnnnnnnnnnnnnnnnnnnnnnnnnnnnnnnnnnnnnnnnnnnnnnnnnnnnnnnnnnnnnnnnnnnnnnnnnnnnnnnnnnnnnnnnnnnnnnnnnnnnnnnnnnnnnnnnnnnnnnnnnnnnnnnnnnnnnnnnnnnnnnnnnnnnnnnnnnnnnnnnnnnnnnnnnnnnnnnnnnnnnnnnnnnnnnnnnnnnnnnnnnnnnnnnnnnnnnnnnnnnnnnnnnnnnnnnnnnnnnnnnnnnnnnnnnnnnnnnnnnnnnnnnnnnnnnnnnnnnnnnnnnnnnnnnnnnnnnnnnnnnnnnnnnnnnnnnnnnnnnnnnnnnnnnnnnnnnnnnnnnnnnnnnnnnnnnnnnnnnnnnnnnnnnnnnnnnnnnnnnnnnnnnnnnnnnnnnnnnnnnnnnnnnnnnnnnnnnnnnnnnnnnnnnnnnnnnnnnnnnnnnnnnnnnnnnnnnnnnnnnnnnnnnnnnnnnnnnnnnnnnnnnnnnnnnnnnnnnnnnnnnnnnnnnnnnnnnnnnnnnnnnnnnnnnnnnnnnnnnnnnnnnnnnnnnnnnnnnnnnnnnnnnnnnnnnnnnnnnnnnnnnnnnnnnnnnnnnnnnnnnnnnnnnnnnnnnnnnnnnnnnnnnnnnnnnnnnnnnnnnnnnnnnnnnnnnnnnnnnnnnnnnnnnnnnnnnnnnnnnnnnnnnnnnnnnnnnnnnnnnnnnnnnnnnnnnnnnnnnnnnnnnnnnnnnnnnnnnnnnnnnnnnnnnnnnnnnnnnnnnnnnnnnnnnnnnnnnnnnnnnnnnnnnnnnnnnnnnnnnnnnnnnnnnnnnnnnnnnnnnnnnnnnnnnnnnnnnnnnnnnnnnnnnnnnnnnnnnnnnnnnnnnnnnnnnnnnnnnnnnnnnnnnnnnnnnnnnnnnnnnnnnnnnnnnnnnnnnnnnnnnnnnnnnnnnnnnnnnnnnnnnnnnnnnnnnnnnnnnnnnnnnnnnnnnnnnnnnnnnnnnnnnnnnnnnnnnnnnnnnnnnnnnnnnnnnnnnnnnnnnnnnnnnnnnnnnnnnnnnnnnnnnnnnnnnnnnnnnnnnnnnnnnnnnnnnnnnnnnnnnnnnnnnnnnnnnnnnnnnnnnnnnnnnnnnnnnnnnnnnnnnnnnnnnnnnnnnnnnnnnnnnnnnnnnnnnnnnnnnnnnnnnnnnnnnnnnnnnnnnnnnnnnnnnnnnnnnnnnnnnnnnnnnnnnnnnnnnnnnnnnnnnnnnnnnnnnnnnnnnnnnnnnnnnnnnnnnnnnnnnnnnnnnnnnnnnnnnnnnnnnnnnnnnnnnnnnnnnnnnnnnnnnnnnnnnnnnnnnnnnnnnnnnnnnnnnnnnnnnnnnnnnnnnnnnnnnnnnnnnnnnnnnnnnnnnnnnnnnnnnnnnnnnnnnnnnnnnnnnnnnnnnnnnnnnnnnnnnnnnnnnnnnnnnnnnnnnnnnnnnnnnnnnnnnnnnnnnnnnnnnnnnnnnnnnnnnnnnnnnnnnnnnnnnnnnnnnnnnnnnnnnnnnnnnnnnnnnnnnnnnnnnnnnnnnnnnnnnnnnnnnnnnnnnnnnnnnnnnnnnnnnnnnnnnnnnnnnnnnnnnnnnnnnnnnnnnnnnnnnnnnnnnnnnnnnnnnnnnnnnnnnnnnnnnnnnnnnnnnnnnnnnnnnnnnnnnnnnnnnnnnnnnnnnnnnnnnnnnnnnnnnnnnnnnnnnnnnnnnnnnnnnnnnnnnnnnnnnnnnnnnnnnnnnnnnnnnnnnnnnnnnnnnnnnnnnnnnnnnnnnnnnnnnnnnnnnnnnnnnnnnnnnnnnnnnnnnnnnnnnnnnnnnnnnnnnnnnnnnnnnnnnnnnnnnnnnnnnnnnnnnnnnnnnnnnnnnnnnnnnnnnnnnnnnnnnnnnnnnnnnnnnnnnnnnnnnnnnnnnnnnnnnnnnnnnnnnnnnnnnnnnnnnnnnnnnnnnnnnnnnnnnnnnnnnnnnnnnnnnnnnnnnnnnnnnnnnnnnnnnnnnnnnnnnnnnnnnnnnnnnnnnnnnnnnnnnnnnnnnnnnnnnnnnnnnnnnnnnnnnnnnnnnnnnnnnnnnnnnnnnnnnnnnnnnnnnnnnnnnnnnnnnnnnnnnnnnnnnnnnnnnnnnnnnnnnnnnnnnnnnnnnnnnnnnnnnnnnnnnnnnnnnnnnnnnnnnnnnnnnnnnnnnnnnnnnnnnnnnnnnnnnnnnnnnnnnnnnnnnnnnnnnnnnnnnnnnnnnnnnnnnnnnnnnnnnnnnnnnnnnnnnnnnnnnnnnnnnnnnnnnnnnnnnnnnnnnnnnnnnnnnnnnnnnnnnnnnnnnnnnnnnnnnnnnnnnnnnnnnnnnnnnnnnnnnnnnnnnnnnnnnnnnnnnnnnnnnnnnnnnnnnnnnnnnnnnnnnnnnnnnnnnnnnnnnnnnnnnnnnnnnnnnnnnnnnnnnnnnnnnnnnnnnnnnnnnnnnnnnnnnnnnnnnnnnnnnnnnnnnnnnnnnnnnnnnnnnnnnnnnnnnnnnnnnnnnnnnnnnnnnnnnnnnnnnnnnnnnnnnnnnnnnnnnnnnnnnnnnnnnnnnnnnnnnnnnnnnnnnnnnnnnnnnnnnnnnnnnnnnnnnnnnnnnnnnnnnnnnnnnnnnnnnnnnnnnnnnnnnnnnnnnnnnnnnnnnnnnnnnnnnnnnnnnnnnnnnnnnnnnnnnnnnnnnnnnnnnnnnnnnnnnnnnnnnnnnnnnnnnnnnnnnnnnnnnnnnnnnnnnnnnnnnnnnnnnnnnnnnnnnnnnnnnnnnnnnnnnnnnnnnnnnnnnnnnnnnnnnnnnnnnnnnnnnnnnnnnnnnnnnnnnnnnnnnnnnnnnnnnnnnnnnnnnnnnnnnnnnnnnnnnnnnnnnnnnnnnnnnnnnnnnnnnnnnnnnnnnnnnnnnnnnnnnnnnnnnnnnnnnnnnnnnnnnnnnnnnnnnnnnnnnnnnnnnnnnnnnnnnnnnnnnnnnnnnnnnnnnnnnnnnnnnnnnnnnnnnnnnnnnnnnnnnnnnnnnnnnnnnnnnnnnnnnnnnnnnnnnnnnnnnnnnnnnnnnnnnnnnnnnnnnnnnnnnnnnnnnnnnnnnnnnnnnnnnnnnnnnnnnnnnnnnnnnnnnnnnnnnnnnnnnnnnnnnnnnnnnnnnnnnnnnnnnnnnnnnnnnnnnnnnnnnnnnnnnnnnnnnnnnnnnnnnnnnnnnnnnnnnnnnnnnnnnnnnnnnnnnnnnnnnnnnnnnnnnnnnnnnnnnnnnnnnnnnnnnnnnnnnnnnnnnnnnnnnnnnnnnnnnnnnnnnnnnnnnnnnnnnnnnnnnnnnnnnnnnnnnnnnnnnnnnnnnnnnnnnnnnnnnnnnnnnnnnnnnnnnnnnnnnnnnnnnnnnnnnnnnnnnnnnnnnnnnnnnnnnnnnnnnnnnnnnnnnnnnnnnnnnnnnnnnnnnnnnnnnnnnnnnnnnnnnnnnnnnnnnnnnnnnnnnnnnnnnnnnnnnnnnnnnnnnnnnnnnnnnnnnnnnnnnnnnnnnnnnnnnnnnnnnnnnnnnnnnnnnnnnnnnnnnnnnnnnnnnnnnnnnnnnnnnnnnnnnnnnnnnnnnnnnnnnnnnnnnnnnnnnnnnnnnnnnnnnnnnnnnnnnnnnnnnnnnnnnnnnnnnnnnnnnnnnnnnnnnnnnnnnnnnnnnnnnnnnnnnnnnnnnnnnnnnnnnnnnnnnnnnnnnnnnnnnnnnnnnnnnnnnnnnnnnnnnnnnnnnnnnnnnnnnnnnnnnnnnnnnnnnnnnnnnnnnnnnnnnnnnnnnnnnnnnnnnnnnnnnnnnnnnnnnnnnnnnnnnnnnnnnnnnnnnnnnnnnnnnnnnnnnnnnnnnnnnnnnnnnnnnnnnnnnnnnnnnnnnnnnnnnnnnnnnnnnnnnnnnnnnnnnnnnnnnnnnnnnnnnnnnnnnnnnnnnnnnnnnnnnnnnnnnnnnnnnnnnnnnnnnnnnnnnnnnnnnnnnnnnnnnnnnnnnnnnnnnnnnnnnnnnnnnnnnnnnnnnnnnnnnnnnnnnnnnnnnnnnnnnnnnnnnnnnnnnnnnnnnnnnnnnnnnnnnnnnnnnnnnnnnnnnnnnnnnnnnnnnnnnnnnnnnnnnnnnnnnnnnnnnnnnnnnnnnnnnnnnnnnnnnnnnnnnnnnnnnnnnnnnnnnnnnnnnnnnnnnnnnnnnnnnnnnnnnnnnnnnnnnnnnnnnnnnnnnnnnnnnnnnnnnnnnnnnnnnnnnnnnnnnnnnnnnnnnnnnnnnnnnnnnnnnnnnnnnnnnnnnnnnnnnnnnnnnnnnnnnnnnnnnnnnnnnnnnnnnnnnnnnnnnnnnnnnnnnnnnnnnnnnnnnnnnnnnnnnnnnnnnnnnnnnnnnnnnnnnnnnnnnnnnnnnnnnnnnnnnnnnnnnnnnnnnnnnnnnnnnnnnnnnnnnnnnnnnnnnnnnnnnnnnnnnnnnnnnnnnnnnnnnnnnnnnnnnnnnnnnnnnnnnnnnnnnnnnnnnnnnnnnnnnnnnnnnnnnnnnnnnnnnnnnnnnnnnnnnnnnnnnnnnnnnnnnnnnnnnnnnnnnnnnnnnnnnnnnnnnnnnnnnnnnnnnnnnnnnnnnnnnnnnnnnnnnnnnnnnnnnnnnnnnnnnnnnnnnnnnnnnnnnnnnnnnnnnnnnnnnnnnnnnnnnnnnnnnnnnnnnnnnnnnnnnnnnnnnnnnnnnnnnnnnnnnnnnnnnnnnnnnnnnnnnnnnnnnnnnnnnnnnnnnnnnnnnnnnnnnnnnnnnnnnnnnnnnnnnnnnnnnnnnnnnnnnnnnnnnnnnnnnnnnnnnnnnnnnnnnnnnnnnnnnnnnnnnnnnnnnnnnnnnnnnnnnnnnnnnnnnnnnnnnnnnnnnnnnnnnnnnnnnnnnnnnnnnnnnnnnnnnnnnnnnnnnnnnnnnnnnnnnnnnnnnnnnnnnnnnnnnnnnnnnnnnnnnnnnnnnnnnnnnnnnnnnnnnnnnnnnnnnnnnnnnnnnnnnnnnnnnnnnnnnnnnnnnnnnnnnnnnnnnnnnnnnnnnnnnnnnnnnnnnnnnnnnnnnnnnnnnnnnnnnnnnnnnnnnnnnnnnnnnnnnnnnnnnnnnnnnnnnnnnnnnnnnnnnnnnnnnnnnnnnnnnnnnnnnnnnnnnnnnnnnnnnnnnnnnnnnnnnnnnnnnnnnnnnnnnnnnnnnnnnnnnnnnnnnnnnnnnnnnnnnnnnnnnnnnnnnnnnnnnnnnnnnnnnnnnnnnnnnnnnnnnnnnnnnnnnnnnnnnnnnnnnnnnnnnnnnnnnnnnnnnnnnnnnnnnnnnnnnnnnnnnnnnnnnnnnnnnnnnnnnnnnnnnnnnnnnnnnnnnnnnnnnnnnnnnnnnnnnnnnnnnnnnnnnnnnnnnnnnnnnnnnnnnnnnnnnnnnnnnnnnnnnnnnnnnnnnnnnnnnnnnnnnnnnnnnnnnnnnnnnnnnnnnnnnnnnnnnnnnnnnnnnnnnnnnnnnnnnnnnnnnnnnnnnnnnnnnnnnnnnnnnnnnnnnnnnnnnnnnnnnnnnnnnnnnnnnnnnnnnnnnnnnnnnnnnnnnnnnnnnnnnnnnnnnnnnnnnnnnnnnnnnnnnnnnnnnnnnnnnnnnnnnnnnnnnnnnnnnnnnnnnnnnnnnnnnnnnnnnnnnnnnnnnnnnnnnnnnnnnnnnnnnnnnnnnnnnnnnnnnnnnnnnnnnnnnnnnnnnnnnnnnnnnnnnnnnnnnnnnnnnnnnnnnnnnnnnnnnnnnnnnnnnnnnnnnnnnnnnnnnnnnnnnnnnnnnnnnnnnnnnnnnnnnnnnnnnnnnnnnnnnnnnnnnnnnnnnnnnnnnnnnnnnnnnnnnnnnnnnnnnnnnnnnnnnnnnnnnnnnnnnnnnnnnnnnnnnnnnnnnnnnnnnnnnnnnnnnnnnnnnnnnnnnnnnnnnnnnnnnnnnnnnnnnnnnnnnnnnnnnnnnnnnnnnnnnnnnnnnnnnnnnnnnnnnnnnnnnnnnnnnnnnnnnnnnnnnnnnnnnnnnnnnnnnnnnnnnnnnnnnnnnnnnnnnnnnnnnnnnnnnnnnnnnnnnnnnnnnnnnnnnnnnnnnnnnnnnnnnnnnnnnnnnnnnnnnnnnnnnnnnnnnnnnnnnnnnnnnnnnnnnnnnnnnnnnnnnnnnnnnnnnnnnnnnnnnnnnnnnnnnnnnnnnnnnnnnnnnnnnnnnnnnnnnnnnnnnnnnnnnnnnnnnnnnnnnnnnnnnnnnnnnnnnnnnnnnnnnnnnnnnnnnnnnnnnnnnnnnnnnnnnnnnnnnnnnnnnnnnnnnnnnnnnnnnnnnnnnnnnnnnnnnnnnnnnnnnnnnnnnnnnnnnnnnnnnnnnnnnnnnnnnnnnnnnnnnnnnnnnnnnnnnnnnnnnnnnnnnnnnnnnnnnnnnnnnnnnnnnnnnnnnnnnnnnnnnnnnnnnnnnnnnnnnnnnnnnnnnnnnnnnnnnnnnnnnnnnnnnnnnnnnnnnnnnnnnnnnnnnnnnnnnnnnnnnnnnnnnnnnnnnnnnnnnnnnnnnnnnnnnnnnnnnnnnnnnnnnnnnnnnnnnnnnnnnnnnnnnnnnnnnnnnnnnnnnnnnnnnnnnnnnnnnnnnnnnnnnnnnnnnnnnnnnnnnnnnnnnnnnnnnnnnnnnnnnnnnnnnnnnnnnnnnnnnnnnnnnnnnnnnnnnnnnnnnnnnnnnnnnnnnnnnnnnnnnnnnnnnnnnnnnnnnnnnnnnnnnnnnnnnnnnnnnnnnnnnnnnnnnnnnnnnnnnnnnnnnnnnnnnnnnnnnnnnnnnnnnnnnnnnnnnnnnnnnnnnnnnnnnnnnnnnnnnnnnnnnnnnnnnnnnnnnnnnnnnnnnnnnnnnnnnnnnnnnnnnnnnnnnnnnnnnnnnnnnnnnnnnnnnnnnnnnnnnnnnnnnnnnnnnnnnnnnnnnnnnnnnnnnnnnnnnnnnnnnnnnnnnnnnnnnnnnnnnnnnnnnnnnnnnnnnnnnnnnnnnnnnnnnnnnnnnnnnnnnnnnnnnnnnnnnnnnnnnnnnnnnnnnnnnnnnnnnnnnnnnnnnnnnnnnnnnnnnnnnnnnnnnnnnnnnnnnnnnnnnnnnnnnnnnnnnnnnnnnnnnnnnnnnnnnnnnnnnnnnnnnnnnnnnnnnnnnnnnnnnnnnnnnnnnnnnnnnnnnnnnnnnnnnnnnnnnnnnnnnnnnnnnnnnnnnnnnnnnnnnnnnnnnnnnnnnnnnnnnnnnnnnnnnnnnnnnnnnnnnnnnnnnnnnnnnnnnnnnnnnnnnnnnnnnnnnnnnnnnnnnnnnnnnnnnnnnnnnnnnnnnnnnnnnnnnnnnnnnnnnnnnnnnnnnnnnnnnnnnnnnnnnnnnnnnnnnnnnnnnnnnnnnnnnnnnnnnnnnnnnnnnnnnnnnnnnnnnnnnnnnnnnnnnnnnnnnnnnnnnnnnnnnnnnnnnnnnnnnnnnnnnnnnnnnnnnnnnnnnnnnnnnnnnnnnnnnnnnnnnnnnnnnnnnnnnnnnnnnnnnnnnnnnnnnnnnnnnnnnnnnnnnnnnnnnnnnnnnnnnnnnnnnnnnnnnnnnnnnnnnnnnnnnnnnnnnnnnnnnnnnnnnnnnnnnnnnnnnnnnnnnnnnnnnnnnnnnnnnnnnnnnnnnnnnnnnnnnnnnnnnnnnnnnnnnnnnnnnnnnnnnnnnnnnnnnnnnnnnnnnnnnnnnnnnnnnnnnnnnnnnnnnnnnnnnnnnnnnnnnnnnnnnnnnnnnnnnnnnnnnnnnnnnnnnnnnnnnnnnnnnnnnnnnnnnnnnnnnnnnnnnnnnnnnnnnnnnnnnnnnnnnnnnnnnnnnnnnnnnnnnnnnnnnnnnnnnnnnnnnnnnnnnnnnnnnnnnnnnnnnnnnnnnnnnnnnnnnnnnnnnnnnnnnnnnnnnnnnnnnnnnnnnnnnnnnnnnnnnnnnnnnnnnnnnnnnnnnnnnnnnnnnnnnnnnnnnnnnnnnnnnnnnnnnnnnnnnnnnnnnnnnnnnnnnnnnnnnnnnnnnnnnnnnnnnnnnnnnnnnnnnnnnnnnnnnnnnnnnnnnnnnnnnnnnnnnnnnnnnnnnnnnnnnnnnnnnnnnnnnnnnnnnnnnnnnnnnnnnnnnnnnnnnnnnnnnnnnnnnnnnnnnnnnnnnnnnnnnnnnnnnnnnnnnnnnnnnnnnnnnnnnnnnnnnnnnnnnnnnnnnnnnnnnnnnnnnnnnnnnnnnnnnnnnnnnnnnnnnnnnnnnnnnnnnnnnnnnnnnnnnnnnnnnnnnnnnnnnnnnnnnnnnnnnnnnnnnnnnnnnnnnnnnnnnnnnnnnnnnnnnnnnnnnnnnnnnnnnnnnnnnnnnnnnnnnnnnnnnnnnnnnnnnnnnnnnnnnnnnnnnnnnnnnnnnnnnnnnnnnnnnnnnnnnnnnnnnnnnnnnnnnnnnnnnnnnnnnnnnnnnnnnnnnnnnnnnnnnnnnnnnnnnnnnnnnnnnnnnnnnnnnnnnnnnnnnnnnnnnnnnnnnnnnnnnnnnnnnnnnnnnnnnnnnnnnnnnnnnnnnnnnnnnnnnnnnnnnnnnnnnnnnnnnnnnnnnnnnnnnnnnnnnnnnnnnnnnnnnnnnnnnnnnnnnnnnnnnnnnnnnnnnnnnnnnnnnnnnnnnnnnnnnnnnnnnnnnnnnnnnnnnnnnnnnnnnnnnnnnnnnnnnnnnnnnnnnnnnnnnnnnnnnnnnnnnnnnnnnnnnnnnnnnnnnnnnnnnnnnnnnnnnnnnnnnnnnnnnnnnnnnnnnnnnnnnnnnnnnnnnnnnnnnnnnnnnnnnnnnnnnnnnnnnnnnnnnnnnnnnnnnnnnnnnnnnnnnnnnnnnnnnnnnnnnnnnnnnnnnnnnnnnnnnnnnnnnnnnnnnnnnnnnnnnnnnnnnnnnnnnnnnnnnnnnnnnnnnnnnnnnnnnnnnnnnnnnnnnnnnnnnnnnnnnnnnnnnnnnnnnnnnnnnnnnnnnnnnnnnnnnnnnnnnnnnnnnnnnnnnnnnnnnnnnnnnnnnnnnnnnnnnnnnnnnnnnnnnnnnnnnnnnnnnnnnnnnnnnnnnnnnnnnnnnnnnnnnnnnnnnnnnnnnnnnnnnnnnnnnnnnnnnnnnnnnnnnnnnnnnnnnnnnnnnnnnnnnnnnnnnnnnnnnnnnnnnnnnnnnnnnnnnnnnnnnnnnnnnnnnnnnnnnnnnnnnnnnnnnnnnnnnnnnnnnnnnnnnnnnnnnnnnnnnnnnnnnnnnnnnnnnnnnnnnnnnnnnnnnnnnnnnnnnnnnnnnnnnnnnnnnnnnnnnnnnnnnnnnnnnnnnnnnnnnnnnnnnnnnnnnnnnnnnnnnnnnnnnnnnnnnnnnnnnnnnnnnnnnnnnnnnnnnnnnnnnnnnnnnnnnnnnnnnnnnnnnnnnnnnnnnnnnnnnnnnnnnnnnnnnnnnnnnnnnnnnnnnnnnnnnnnnnnnnnnnnnnnnnnnnnnnnnnnnnnnnnnnnnnnnnnnnnnnnnnnnnnnnnnnnnnnnnnnnnnnnnnnnnnnnnnnnnnnnnnnnnnnnnnnnnnnnnnnnnnnnnnnnnnnnnnnnnnnnnnnnnnnnnnnnnnnnnnnnnnnnnnnnnnnnnnnnnnnnnnnnnnnnnnnnnnnnnnnnnnnnnnnnnnnnnnnnnnnnnnnnnnnnnnnnnnnnnnnnnnnnnnnnnnnnnnnnnnnnnnnnnnnnnnnnnnnnnnnnnnnnnnnnnnnnnnnnnnnnnnnnnnnnnnnnnnnnnnnnnnnnnnnnnnnnnnnnnnnnnnnnnnnnnnnnnnnnnnnnnnnnnnnnnnnnnnnnnnnnnnnnnnnnnnnnnnnnnnnnnnnnnnnnnnnnnnnnnnnnnnnnnnnnnnnnnnnnnnnnnnnnnnnnnnnnnnnnnnnnnnnnnnnnnnnnnnnnnnnnnnnnnnnnnnnnnnnnnnnnnnnnnnnnnnnnnnnnnnnnnnnnnnnnnnnnnnnnnnnnnnnnnnnnnnnnnnnnnnnnnnnnnnnnnnnnnnnnnnnnnnnnnnnnnnnnnnnnnnnnnnnnnnnnnnnnnnnnnnnnnnnnnnnnnnnnnnnnnnnnnnnnnnnnnnnnnnnnnnnnnnnnnnnnnnnnnnnnnnnnnnnnnnnnnnnnnnnnnnnnnnnnnnnnnnnnnnnnnnnnnnnnnnnnnnnnnnnnnnnnnnnnnnnnnnnnnnnnnnnnnnnnnnnnnnnnnnnnnnnnnnnnnnnnnnnnnnnnnnnnnnnnnnnnnnnnnnnnnnnnnnnnnnnnnnnnnnnnnnnnnnnnnnnnnnnnnnnnnnnnnnnnnnnnnnnnnnnnnnnnnnnnnnnnnnnnnnnnnnnnnnnnnnnnnnnnnnnnnnnnnnnnnnnnnnnnnnnnnnnnnnnnnnnnnnnnnnnnnnnnnnnnnnnnnnnnnnnnnnnnnnnnnnnnnnnnnnnnnnnnnnnnnnnnnnnnnnnnnnnnnnnnnnnnnnnnnnnnnnnnnnnnnnnnnnnnnnnnnnnnnnnnnnnnnnnnnnnnnnnnnnnnnnnnnnnnnnnnnnnnnnnnnnnnnnnnnnnnnnnnnnnnnnnnnnnnnnnnnnnnnnnnnnnnnnnnnnnnnnnnnnnnnnnnnnnnnnnnnnnnnnnnnnnnnnnnnnnnnnnnnnnnnnnnnnnnnnnnnnnnnnnnnnnnnnnnnnnnnnnnnnnnnnnnnnnnnnnnnnnnnnnnnnnnnnnnnnnnnnnnnnnnnnnnnnnnnnnnnnnnnnnnnnnnnnnnnnnnnnnnnnnnnnnnnnnnnnnnnnnnnnnnnnnnnnnnnnnnnnnnnnnnnnnnnnnnnnnnnnnnnnnnnnnnnnnnnnnnnnnnnnnnnnnnnnnnnnnnnnnnnnnnnnnnnnnnnnnnnnnnnnnnnnnnnnnnnnnnnnnnnnnnnnnnnnnnnnnnnnnnnnnnnnnnnnnnnnnnnnnnnnnnnnnnnnnnnnnnnnnnnnnnnnnnnnnnnnnnnnnnnnnnnnnnnnnnnnnnnnnnnnnnnnnnnnnnnnnnnnnnnnnnnnnnnnnnnnnnnnnnnnnnnnnnnnnnnnnnnnnnnnnnnnnnnnnnnnnnnnnnnnnnnnnnnnnnnnnnnnnnnnnnnnnnnnnnnnnnnnnnnnnnnnnnnnnnnnnnnnnnnnnnnnnnnnnnnnnnnnnnnnnnnnnnnnnnnnnnnnnnnnnnnnnnnnnnnnnnnnnnnnnnnnnnnnnnnnnnnnnnnnnnnnnnnnnnnnnnnnnnnnnnnnnnnnnnnnnnnnnnnnnnnnnnnnnnnnnnnnnnnnnnnnnnnnnnnnnnnnnnnnnnnnnnnnnnnnnnnnnnnnnnnnnnnnnnnnnnnnnnnnnnnnnnnnnnnnnnnnnnnnnnnnnnnnnnnnnnnnnnnnnnnnnnnnnnnnnnnnnnnnnnnnnnnnnnnnnnnnnnnnnnnnnnnnnnnnnnnnnnnnnnnnnnnnnnnnnnnnnnnnnnnnnnnnnnnnnnnnnnnnnnnnnnnnnnnnnnnnnnnnnnnnnnnnnnnnnnnnnnnnnnnnnnnnnnnnnnnnnnnnnnnnnnnnnnnnnnnnnnnnnnnnnnnnnnnnnnnnnnnnnnnnnnnnnnnnnnnnnnnnnnnnnnnnnnnnnnnnnnnnnnnnnnnnnnnnnnnnnnnnnnnnnnnnnnnnnnnnnnnnnnnnnnnnnnnnnnnnnnnnnnnnnnnnnnnnnnnnnnnnnnnnnnnnnnnnnnnnnnnnnnnnnnnnnnnnnnnnnnnnnnnnnnnnnnnnnnnnnnnnnnnnnnnnnnnnnnnnnnnnnnnnnnnnnnnnnnnnnnnnnnnnnnnnnnnnnnnnnnnnnnnnnnnnnnnnnnnnnnnnnnnnnnnnnnnnnnnnnnnnnnnnnnnnnnnnnnnnnnnnnnnnnnnnnnnnnnnnnnnnnnnnnnnnnnnnnnnnnnnnnnnnnnnnnnnnnnnnnnnnnnnnnnnnnnnnnnnnnnnnnnnnnnnnnnnnnnnnnnnnnnnnnnnnnnnnnnnnnnnnnnnnnnnnnnnnnnnnnnnnnnnnnnnnnnnnnnnnnnnnnnnnnnnnnnnnnnnnnnnnnnnnnnnnnnnnnnnnnnnnnnnnnnnnnnnnnnnnnnnnnnnnnnnnnnnnnnnnnnnnnnnnnnnnnnnnnnnnnnnnnnnnnnnnnnnnnnnnnnnnnnnnnnnnnnnnnnnnnnnnnnnnnnnnnnnnnnnnnnnnnnnnnnnnnnnnnnnnnnnnnnnnnnnnnnnnnnnnnnnnnnnnnnnnnnnnnnnnnnnnnnnnnnnnnnnnnnnnnnnnnnnnnnnnnnnnnnnnnnnnnnnnnnnnnnnnnnnnnnnnnnnnnnnnnnnnnnnnnnnnnnnnnnnnnnnnnnnnnnnnnnnnnnnnnnnnnnnnnnnnnnnnnnnnnnnnnnnnnnnnnnnnnnnnnnnnnnnnnnnnnnnnnnnnnnnnnnnnnnnnnnnnnnnnnnnnnnnnnnnnnnnnnnnnnnnnnnnnnnnnnnnnnnnnnnnnnnnnnnnnnnnnnnnnnnnnnnnnnnnnnnnnnnnnnnnnnnnnnnnnnnnnnnnnnnnnnnnnnnnnnnnnnnnnnnnnnnnnnnnnnnnnnnnnnnnnnnnnnnnnnnnnnnnnnnnnnnnnnnnnnnnnnnnnnnnnnnnnnnnnnnnnnnnnnnnnnnnnnnnnnnnnnnnnnnnnnnnnnnnnnnnnnnnnnnnnnnnnnnnnnnnnnnnnnnnnnnnnnnnnnnnnnnnnnnnnnnnnnnnnnnnnnnnnnnnnnnnnnnnnnnnnnnnnnnnnnnnnnnnnnnnnnnnnnnnnnnnnnnnnnnnnnnnnnnnnnnnnnnnnnnnnnnnnnnnnnnnnnnnnnnnnnnnnnnnnnnnnnnnnnnnnnnnnnnnnnnnnnnnnnnnnnnnnnnnnnnnnnnnnnnnnnnnnnnnnnnnnnnnnnnnnnnnnnnnnnnnnnnnnnnnnnnnnnnnnnnnnnnnnnnnnnnnnnnnnnnnnnnnnnnnnnnnnnnnnnnnnnnnnnnnnnnnnnnnnnnnnnnnnnnnnnnnnnnnnnnnnnnnnnnnnnnnnnnnnnnnnnnnnnnnnnnnnnnnnnnnnnnnnnnnnnnnnnnnnnnnnnnnnnnnnnnnnnnnnnnnnnnnnnnnnnnnnnnnnnnnnnnnnnnnnnnnnnnnnnnnnnnnnnnnnnnnnnnnnnnnnnnnnnnnnnnnnnnnnnnnnnnnnnnnnnnnnnnnnnnnnnnnnnnnnnnnnnnnnnnnnnnnnnnnnnnnnnnnnnnnnnnnnnnnnnnnnnnnnnnnnnnnnnnnnnnnnnnnnnnnnnnnnnnnnnnnnnnnnnnnnnnnnnnnnnnnnnnnnnnnnnnnnnnnnnnnnnnnnnnnnnnnnnnnnnnnnnnnnnnnnnnnnnnnnnnnnnnnnnnnnnnnnnnnnnnnnnnnnnnnnnnnnnnnnnnnnnnnnnnnnnnnnnnnnnnnnnnnnnnnnnnnnnnnnnnnnnnnnnnnnnnnnnnnnnnnnnnnnnnnnnnnnnnnnnnnnnnnnnnnnnnnnnnnnnnnnnnnnnnnnnnnnnnnnnnnnnnnnnnnnnnnnnnnnnnnnnnnnnnnnnnnnnnnnnnnnnnnnnnnnnnnnnnnnnnnnnnnnnnnnnnnnnnnnnnnnnnnnnnnnnnnnnnnnnnnnnnnnnnnnnnnnnnnnnnnnnnnnnnnnnnnnnnnnnnnnnnnnnnnnnnnnnnnnnnnnnnnnnnnnnnnnnnnnnnnnnnnnnnnnnnnnnnnnnnnnnnnnnnnnnnnnnnnnnnnnnnnnnnnnnnnnnnnnnnnnnnnnnnnnnnnnnnnnnnnnnnnnnnnnnnnnnnnnnnnnnnnnnnnnnnnnnnnnnnnnnnnnnnnnnnnnnnnnnnnnnnnnnnnnnnnnnnnnnnnnnnnnnnnnnnnnnnnnnnnnnnnnnnnnnnnnnnnnnnnnnnnnnnnnnnnnnnnnnnnnnnnnnnnnnnnnnnnnnnnnnnnnnnnnnnnnnnnnnnnnnnnnnnnnnnnnnnnnnnnnnnnnnnnnnnnnnnnnnnnnnnnnnnnnnnnnnnnnnnnnnnnnnnnnnnnnnnnnnnnnnnnnnnnnnnnnnnnnnnnnnnnnnnnnnnnnnnnnnnnnnnnnnnnnnnnnnnnnnnnnnnnnnnnnnnnnnnnnnnnnnnnnnnnnnnnnnnnnnnnnnnnnnnnnnnnnnnnnnnnnnnnnnnnnnnnnnnnnnnnnnnnnnnnnnnnnnnnnnnnnnnnnnnnnnnnnnnnnnnnnnnnnnnnnnnnnnnnnnnnnnnnnnnnnnnnnnnnnnnnnnnnnnnnnnnnnnnnnnnnnnnnnnnnnnnnnnnnnnnnnnnnnnnnnnnnnnnnnnnnnnnnnnnnnnnnnnnnnnnnnnnnnnnnnnnnnnnnnnnnnnnnnnnnnnnnnnnnnnnnnnnnnnnnnnnnnnnnnnnnnnnnnnnnnnnnnnnnnnnnnnnnnnnnnnnnnnnnnnnnnnnnnnnnnnnnnnnnnnnnnnnnnnnnnnnnnnnnnnnnnnnnnnnnnnnnnnnnnnnnnnnnnnnnnnnnnnnnnnnnnnnnnnnnnnnnnnnnnnnnnnnnnnnnnnnnnnnnnnnnnnnnnnnnnnnnnnnnnnnnnnnnnnnnnnnnnnnnnnnnnnnnnnnnnnnnnnnnnnnnnnnnnnnnnnnnnnnnnnnnnnnnnnnnnnnnnnnnnnnnnnnnnnnnnnnnnnnnnnnnnnnnnnnnnnnnnnnnnnnnnnnnnnnnnnnnnnnnnnnnnnnnnnnnnnnnnnnnnnnnnnnnnnnnnnnnnnnnnnnnnnnnnnnnnnnnnnnnnnnnnnnnnnnnnnnnnnnnnnnnnnnnnnnnnnnnnnnnnnnnnnnnnnnnnnnnnnnnnnnnnnnnnnnnnnnnnnnnnnnnnnnnnnnnnnnnnnnnnnnnnnnnnnnnnnnnnnnnnnnnnnnnnnnnnnnnnnnnnnnnnnnnnnnnnnnnnnnnnnnnnnnnnnnnnnnnnnnnnnnnnnnnnnnnnnnnnnnnnnnnnnnnnnnnnnnnnnnnnnnnnnnnnnnnnnnnnnnnnnnnnnnnnnnnnnnnnnnnnnnnnnnnnnnnnnnnnnnnnnnnnnnnnnnnnnnnnnnnnnnnnnnnnnnnnnnnnnnnnnnnnnnnnnnnnnnnnnnnnnnnnnnnnnnnnnnnnnnnnnnnnnnnnnnnnnnnnnnnnnnnnnnnnnnnnnnnnnnnnnnnnnnnnnnnnnnnnnnnnnnnnnnnnnnnnnnnnnnnnnnnnnnnnnnnnnnnnnnnnnnnnnnnnnnnnnnnnnnnnnnnnnnnnnnnnnnnnnnnnnnnnnnnnnnnnnnnnnnnnnnnnnnnnnnnnnnnnnnnnnnnnnnnnnnnnnnnnnnnnnnnnnnnnnnnnnnnnnnnnnnnnnnnnnnnnnnnnnnnnnnnnnnnnnnnnnnnnnnnnnnnnnnnnnnnnnnnnnnnnnnnnnnnnnnnnnnnnnnnnnnnnnnnnnnnnnnnnnnnnnnnnnnnnnnnnnnnnnnnnnnnnnnnnnnnnnnnnnnnnnnnnnnnnnnnnnnnnnnnnnnnnnnnnnnnnnnnnnnnnnnnnnnnnnnnnnnnnnnnnnnnnnnnnnnnnnnnnnnnnnnnnnnnnnnnnnnnnnnnnnnnnnnnnnnnnnnnnnnnnnnnnnnnnnnnnnnnnnnnnnnnnnnnnnnnnnnnnnnnnnnnnnnnnnnnnnnnnnnnnnnnnnnnnnnnnnnnnnnnnnnnnnnnnnnnnnnnnnnnnnnnnnnnnnnnnnnnnnnnnnnnnnnnnnnnnnnnnnnnnnnnnnnnnnnnnnnnnnnnnnnnnnnnnnnnnnnnnnnnnnnnnnnnnnnnnnnnnnnnnnnnnnnnnnnnnnnnnnnnnnnnnnnnnnnnnnnnnnnnnnnnnnnnnnnnnnnnnnnnnnnnnnnnnnnnnnnnnnnnnnnnnnnnnnnnnnnnnnnnnnnnnnnnnnnnnnnnnnnnnnnnnnnnnnnnnnnnnnnnnnnnnnnnnnnnnnnnnnnnnnnnnnnnnnnnnnnnnnnnnnnnnnnnnnnnnnnnnnnnnnnnnnnnnnnnnnnnnnnnnnnnnnnnnnnnnnnnnnnnnnnnnnnnnnnnnnnnnnnnnnnnnnnnnnnnnnnnnnnnnnnnnnnnnnnnnnnnnnnnnnnnnnnnnnnnnnnnnnnnnnnnnnnnnnnnnnnnnnnnnnnnnnnnnnnnnnnnnnnnnnnnnnnnnnnnnnnnnnnnnnnnnnnnnnnnnnnnnnnnnnnnnnnnnnnnnnnnnnnnnnnnnnnnnnnnnnnnnnnnnnnnnnnnnnnnnnnnnnnnnnnnnnnnnnnnnnnnnnnnnnnnnnnnnnnnnnnnnnnnnnnnnnnnnnnnnnnnnnnnnnnnnnnnnnnnnnnnnnnnnnnnnnnnnnnnnnnnnnnnnnnnnnnnnnnnnnnnnnnnnnnnnnnnnnnnnnnnnnnnnnnnnnnnnnnnnnnnnnnnnnnnnnnnnnnnnnnnnnnnnnnnnnnnnnnnnnnnnnnnnnnnnnnnnnnnnnnnnnnnnnnnnnnnnnnnnnnnnnnnnnnnnnnnnnnnnnnnnnnnnnnnnnnnnnnnnnnnnnnnnnnnnnnnnnnnnnnnnnnnnnnnnnnnnnnnnnnnnnnnnnnnnnnnnnnnnnnnnnnnnnnnnnnnnnnnnnnnnnnnnnnnnnnnnnnnnnnnnnnnnnnnnnnnnnnnnnnnnnnnnnnnnnnnnnnnnnnnnnnnnnnnnnnnnnnnnnnnnnnnnnnnnnnnnnnnnnnnnnnnnnnnnnnnnnnnnnnnnnnnnnnnnnnnnnnnnnnnnnnnnnnnnnnnnnnnnnnnnnnnnnnnnnnnnnnnnnnnnnnnnnnnnnnnnnnnnnnnnnnnnnnnnnnnnnnnnnnnnnnnnnnnnnnnnnnnnnnnnnnnnnnnnnnnnnnnnnnnnnnnnnnnnnnnnnnnnnnnnnnnnnnnnnnnnnnnnnnnnnnnnnnnnnnnnnnnnnnnnnnnnnnnnnnnnnnnnnnnnnnnnnnnnnnnnnnnnnnnnnnnnnnnnnnnnnnnnnnnnnnnnnnnnnnnnnnnnnnnnnnnnnnnnnnnnnnnnnnnnnnnnnnnnnnnnnnnnnnnnnnnnnnnnnnnnnnnnnnnnnnnnnnnnnnnnnnnnnnnnnnnnnnnnnnnnnnnnnnnnnnnnnnnnnnnnnnnnnnnnnnnnnnnnnnnnnnnnnnnnnnnnnnnnnnnnnnnnnnnnnnnnnnnnnnnnnnnnnnnnnnnnnnnnnnnnnnnnnnnnnnnnnnnnnnnnnnnnnnnnnnnnnnnnnnnnnnnnnnnnnnnnnnnnnnnnnnnnnnnnnnnnnnnnnnnnnnnnnnnnnnnnnnnnnnnnnnnnnnnnnnnnnnnnnnnnnnnnnnnnnnnnnnnnnnnnnnnnnnnnnnnnnnnnnnnnnnnnnnnnnnnnnnnnnnnnnnnnnnnnnnnnnnnnnnnnnnnnnnnnnnnnnnnnnnnnnnnnnnnnnnnnnnnnnnnnnnnnnnnnnnnnnnnnnnnnnnnnnnnnnnnnnnnnnnnnnnnnnnnnnnnnnnnnnnnnnnnnnnnnnnnnnnnnnnnnnnnnnnnnnnnnnnnnnnnnnnnnnnnnnnnnnnnnnnnnnnnnnnnnnnnnnnnnnnnnnnnnnnnnnnnnnnnnnnnnnnnnnnnnnnnnnnnnnnnnnnnnnnnnnnnnnnnnnnnnnnnnnnnnnnnnnnnnnnnnnnnnnnnnnnnnnnnnnnnnnnnnnnnnnnnnnnnnnnnnnnnnnnnnnnnnnnnnnnnnnnnnnnnnnnnnnnnnnnnnnnnnnnnnnnnnnnnnnnnnnnnnnnnnnnnnnnnnnnnnnnnnnnnnnnnnnnnnnnnnnnnnnnnnnnnnnnnnnnnnnnnnnnnnnnnnnnnnnnnnnnnnnnnnnnnnnnnnnnnnnnnnnnnnnnnnnnnnnnnnnnnnnnnnnnnnnnnnnnnnnnnnnnnnnnnnnnnnnnnnnnnnnnnnnnnnnnnnnnnnnnnnnnnnnnnnnnnnnnnnnnnnnnnnnnnnnnnnnnnnnnnnnnnnnnnnnnnnnnnnnnnnnnnnnnnnnnnnnnnnnnnnnnnnnnnnnnnnnnnnnnnnnnnnnnnnnnnnnnnnnnnnnnnnnnnnnnnnnnnnnnnnnnnnnnnnnnnnnnnnnnnnnnnnnnnnnnnnnnnnnnnnnnnnnnnnnnnnnnnnnnnnnnnnnnnnnnnnnnnnnnnnnnnnnnnnnnnnnnnnnnnnnnnnnnnnnnnnnnnnnnnnnnnnnnnnnnnnnnnnnnnnnnnnnnnnnnnnnnnnnnnnnnnnnnnnnnnnnnnnnnnnnnnnnnnnnnnnnnnnnnnnnnnnnnnnnnnnnnnnnnnnnnnnnnnnnnnnnnnnnnnnnnnnnnnnnnnnnnnnnnnnnnnnnnnnnnnnnnnnnnnnnnnnnnnnnnnnnnnnnnnnnnnnnnnnnnnnnnnnnnnnnnnnnnnnnnnnnnnnnnnnnnnnnnnnnnnnnnnnnnnnnnnnnnnnnnnnnnnnnnnnnnnnnnnnnnnnnnnnnnnnnnnnnnnnnnnnnnnnnnnnnnnnnnnnnnnnnnnnnnnnnnnnnnnnnnnnnnnnnnnnnnnnnnnnnnnnnnnnnnnnnnnnnnnnnnnnnnnnnnnnnnnnnnnnnnnnnnnnnnnnnnnnnnnnnnnnnnnnnnnnnnnnnnnnnnnnnnnnnnnnnnnnnnnnnnnnnnnnnnnnnnnnnnnnnnnnnnnnnnnnnnnnnnnnnnnnnnnnnnnnnnnnnnnnnnnnnnnnnnnnnnnnnnnnnnnnnnnnnnnnnnnnnnnnnnnnnnnnnnnnnnnnnnnnnnnnnnnnnnnnnnnnnnnnnnnnnnnnnnnnnnnnnnnnnnnnnnnnnnnnnnnnnnnnnnnnnnnnnnnnnnnnnnnnnnnnnnnnnnnnnnnnnnnnnnnnnnnnnnnnnnnnnnnnnnnnnnnnnnnnnnnnnnnnnnnnnnnnnnnnnnnnnnnnnnnnnnnnnnnnnnnnnnnnnnnnnnnnnnnnnnnnnnnnnnnnnnnnnnnnnnnnnnnnnnnnnnnnnnnnnnnnnnnnnnnnnnnnnnnnnnnnnnnnnnnnnnnnnnnnnnnnnnnnnnnnnnnnnnnnnnnnnnnnnnnnnnnnnnnnnnnnnnnnnnnnnnnnnnnnnnnnnnnnnnnnnnnnnnnnnnnnnnnnnnnnnnnnnnnnnnnnnnnnnnnnnnnnnnnnnnnnnnnnnnnnnnnnnnnnnnnnnnnnnnnnnnnnnnnnnnnnnnnnnnnnnnnnnnnnnnnnnnnnnnnnnnnnnnnnnnnnnnnnnnnnnnnnnnnnnnnnnnnnnnnnnnnnnnnnnnnnnnnnnnnnnnnnnnnnnnnnnnnnnnnnnnnnnnnnnnnnnnnnnnnnnnnnnnnnnnnnnnnnnnnnnnnnnnnnnnnnnnnnnnnnnnnnnnnnnnnnnnnnnnnnnnnnnnnnnnnnnnnnnnnnnnnnnnnnnnnnnnnnnnnnnnnnnnnnnnnnnnnnnnnnnnnnnnnnnnnnnnnnnnnnnnnnnnnnnnnnnnnnnnnnnnnnnnnnnnnnnnnnnnnnnnnnnnnnnnnnnnnnnnnnnnnnnnnnnnnnnnnnnnnnnnnnnnnnnnnnnnnnnnnnnnnnnnnnnnnnnnnnnnnnnnnnnnnnnnnnnnnnnnnnnnnnnnnnnnnnnnnnnnnnnnnnnnnnnnnnnnnnnnnnnnnnnnnnnnnnnnnnnnnnnnnnnnnnnnnnnnnnnnnnnnnnnnnnnnnnnnnnnnnnnnnnnnnnnnnnnnnnnnnnnnnnnnnnnnnnnnnnnnnnnnnnnnnnnnnnnnnnnnnnnnnnnnnnnnnnnnnnnnnnnnnnnnnnnnnnnnnnnnnnnnnnnnnnnnnnnnnnnnnnnnnnnnnnnnnnnnnnnnnnnnnnnnnnnnnnnnnnnnnnnnnnnnnnnnnnnnnnnnnnnnnnnnnnnnnnnnnnnnnnnnnnnnnnnnnnnnnnnnnnnnnnnnnnnnnnnnnnnnnnnnnnnnnnnnnnnnnnnnnnnnnnnnnnnnnnnnnnnnnnnnnnnnnnnnnnnnnnnnnnnnnnnnnnnnnnnnnnnnnnnnnnnnnnnnnnnnnnnnnnnnnnnnnnnnnnnnnnnnnnnnnnnnnnnnnnnnnnnnnnnnnnnnnnnnnnnnnnnnnnnnnnnnnnnnnnnnnnnnnnnnnnnnnnnnnnnnnnnnnnnnnnnnnnnnnnnnnnnnnnnnnnnnnnnnnnnnnnnnnnnnnnnnnnnnnnnnnnnnnnnnnnnnnnnnnnnnnnnnnnnnnnnnnnnnnnnnnnnnnnnnnnnnnnnnnnnnnnnnnnnnnnnnnnnnnnnnnnnnnnnnnnnnnnnnnnnnnnnnnnnnnnnnnnnnnnnnnnnnnnnnnnnnnnnnnnnnnnnnnnnnnnnnnnnnnnnnnnnnnnnnnnnnnnnnnnnnnnnnnnnnnnnnnnnnnnnnnnnnnnnnnnnnnnnnnnnnnnnnnnnnnnnnnnnnnnnnnnnnnnnnnnnnnnnnnnnnnnnnnnnnnnnnnnnnnnnnnnnnnnnnnnnnnnnnnnnnnnnnnnnnnnnnnnnnnnnnnnnnnnnnnnnnnnnnnnnnnnnnnnnnnnnnnnnnnnnnnnnnnnnnnnnnnnnnnnnnnnnnnnnnnnnnnnnnnnnnnnnnnnnnnnnnnnnnnnnnnnnnnnnnnnnnnnnnnnnnnnnnnnnnnnnnnnnnnnnnnnnnnnnnnnnnnnnnnnnnnnnnnnnnnnnnnnnnnnnnnnnnnnnnnnnnnnnnnnnnnnnnnnnnnnnnnnnnnnnnnnnnnnnnnnnnnnnnnnnnnnnnnnnnnnnnnnnnnnnnnnnnnnnnnnnnnnnnnnnnnnnnnnnnnnnnnnnnnnnnnnnnnnnnnnnnnnnnnnnnnnnnnnnnnnnnnnnnnnnnnnnnnnnnnnnnnnnnnnnnnnnnnnnnnnnnnnnnnnnnnnnnnnnnnnnnnnnnnnnnnnnnnnnnnnnnnnnnnnnnnnnnnnnnnnnnnnnnnnnnnnnnnnnnnnnnnnnnnnnnnnnnnnnnnnnnnnnnnnnnnnnnnnnnnnnnnnnnnnnnnnnnnnnnnnnnnnnnnnnnnnnnnnnnnnnnnnnnnnnnnnnnnnnnnnnnnnnnnnnnnnnnnnnnnnnnnnnnnnnnnnnnnnnnnnnnnnnnnnnnnnnnnnnnnnnnnnnnnnnnnnnnnnnnnnnnnnnnnnnnnnnnnnnnnnnnnnnnnnnnnnnnnnnnnnnnnnnnnnnnnnnnnnnnnnnnnnnnnnnnnnnnnnnnnnnnnnnnnnnnnnnnnnnnnnnnnnnnnnnnnnnnnnnnnnnnnnnnnnnnnnnnnnnnnnnnnnnnnnnnnnnnnnnnnnnnnnnnnnnnnnnnnnnnnnnnnnnnnnnnnnnnnnnnnnnnnnnnnnnnnnnnnnnnnnnnnnnnnnnnnnnnnnnnnnnnnnnnnnnnnnnnnnnnnnnnnnnnnnnnnnnnnnnnnnnnnnnnnnnnnnnnnnnnnnnnnnnnnnnnnnnnnnnnnnnnnnnnnnnnnnnnnnnnnnnnnnnnnnnnnnnnnnnnnnnnnnnnnnnnnnnnnnnnnnnnnnnnnnnnnnnnnnnnnnnnnnnnnnnnnnnnnnnnnnnnnnnnnnnnnnnnnnnnnnnnnnnnnnnnnnnnnnnnnnnnnnnnnnnnnnnnnnnnnnnnnnnnnnnnnnnnnnnnnnnnnnnnnnnnnnnnnnnnnnnnnnnnnnnnnnnnnnnnnnnnnnnnnnnnnnnnnnnnnnnnnnnnnnnnnnnnnnnnnnnnnnnnnnnnnnnnnnnnnnnnnnnnnnnnnnnnnnnnnnnnnnnnnnnnnnnnnnnnnnnnnnnnnnnnnnnnnnnnnnnnnnnnnnnnnnnnnnnnnnnnnnnnnnnnnnnnnnnnnnnnnnnnnnnnnnnnnnnnnnnnnnnnnnnnnnnnnnnnnnnnnnnnnnnnnnnnnnnnnnnnnnnnnnnnnnnnnnnnnnnnnnnnnnnnnnnnnnnnnnnnnnnnnnnnnnnnnnnnnnnnnnnnnnnnnnnnnnnnnnnnnnnnnnnnnnnnnnnnnnnnnnnnnnnnnnnnnnnnnnnnnnnnnnnnnnnnnnnnnnnnnnnnnnnnnnnnnnnnnnnnnnnnnnnnnnnnnnnnnnnnnnnnnnnnnnnnnnnnnnnnnnnnnnnnnnnnnnnnnnnnnnnnnnnnnnnnnnnnnnnnnnnnnnnnnnnnnnnnnnnnnnnnnnnnnnnnnnnnnnnnnnnnnnnnnnnnnnnnnnnnnnnnnnnnnnnnnnnnnnnnnnnnnnnnnnnnnnnnnnnnnnnnnnnnnnnnnnnnnnnnnnnnnnnnnnnnnnnnnnnnnnnnnnnnnnnnnnnnnnnnnnnnnnnnnnnnnnnnnnnnnnnnnnnnnnnnnnnnnnnnnnnnnnnnnnnnnnnnnnnnnnnnnnnnnnnnnnnnnnnnnnnnnnnnnnnnnnnnnnnnnnnnnnnnnnnnnnnnnnnnnnnnnnnnnnnnnnnnnnnnnnnnnnnnnnnnnnnnnnnnnnnnnnnnnnnnnnnnnnnnnnnnnnnnnnnnnnnnnnnnnnnnnnnnnnnnnnnnnnnnnnnnnnnnnnnnnnnnnnnnnnnnnnnnnnnnnnnnnnnnnnnnnnnnnnnnnnnnnnnnnnnnnnnnnnnnnnnnnnnnnnnnnnnnnnnnnnnnnnnnnnnnnnnnnnnnnnnnnnnnnnnnnnnnnnnnnnnnnnnnnnnnnnnnnnnnnnnnnnnnnnnnnnnnnnnnnnnnnnnnnnnnnnnnnnnnnnnnnnnnnnnnnnnnnnnnnnnnnnnnnnnnnnnnnnnnnnnnnnnnnnnnnnnnnnnnnnnnnnnnnnnnnnnnnnnnnnnnnnnnnnnnnnnnnnnnnnnnnnnnnnnnnnnnnnnnnnnnnnnnnnnnnnnnnnnnnnnnnnnnnnnnnnnnnnnnnnnnnnnnnnnnnnnnnnnnnnnnnnnnnnnnnnnnnnnnnnnnnnnnnnnnnnnnnnnnnnnnnnnnnnnnnnnnnnnnnnnnnnnnnnnnnnnnnnnnnnnnnnnnnnnnnnnnnnnnnnnnnnnnnnnnnnnnnnnnnnnnnnnnnnnnnnnnnnnnnnnnnnnnnnnnnnnnnnnnnnnnnnnnnnnnnnnnnnnnnnnnnnnnnnnnnnnnnnnnnnnnnnnnnnnnnnnnnnnnnnnnnnnnnnnnnnnnnnnnnnnnnnnnnnnnnnnnnnnnnnnnnnnnnnnnnnnnnnnnnnnnnnnnnnnnnnnnnnnnnnnnnnnnnnnnnnnnnnnnnnnnnnnnnnnnnnnnnnnnnnnnnnnnnnnnnnnnnnnnnnnnnnnnnnnnnnnnnnnnnnnnnnnnnnnnnnnnnnnnnnnnnnnnnnnnnnnnnnnnnnnnnnnnnnnnnnnnnnnnnnnnnnnnnnnnnnnnnnnnnnnnnnnnnnnnnnnnnnnnnnnnnnnnnnnnnnnnnnnnnnnnnnnnnnnnnnnnnnnnnnnnnnnnnnnnnnnnnnnnnnnnnnnnnnnnnnnnnnnnnnnnnnnnnnnnnnnnnnnnnnnnnnnnnnnnnnnnnnnnnnnnnnnnnnnnnnnnnnnnnnnnnnnnnnnnnnnnnnnnnnnnnnnnnnnnnnnnnnnnnnnnnnnnnnnnnnnnnnnnnnnnnnnnnnnnnnnnnnnnnnnnnnnnnnnnnnnnnnnnnnnnnnnnnnnnnnnnnnnnnnnnnnnnnnnnnnnnnnnnnnnnnnnnnnnnnnnnnnnnnnnnnnnnnnnnnnnnnnnnnnnnnnnnnnnnnnnnnnnnnnnnnnnnnnnnnnnnnnnnnnnnnnnnnnnnnnnnnnnnnnnnnnnnnnnnnnnnnnnnnnnnnnnnnnnnnnnnnnnnnnnnnnnnnnnnnnnnnnnnnnnnnnnnnnnnnnnnnnnnnnnnnnnnnnnnnnnnnnnnnnnnnnnnnnnnnnnnnnnnnnnnnnnnnnnnnnnnnnnnnnnnnnnnnnnnnnnnnnnnnnnnnnnnnnnnnnnnnnnnnnnnnnnnnnnnnnnnnnnnnnnnnnnnnnnnnnnnnnnnnnnnnnnnnnnnnnnnnnnnnnnnnnnnnnnnnnnnnnnnnnnnnnnnnnnnnnnnnnnnnnnnnnnnnnnnnnnnnnnnnnnnnnnnnnnnnnnnnnnnnnnnnnnnnnnnnnnnnnnnnnnnnnnnnnnnnnnnnnnnnnnnnnnnnnnnnnnnnnnnnnnnnnnnnnnnnnnnnnnnnnnnnnnnnnnnnnnnnnnnnnnnnnnnnnnnnnnnnnnnnnnnnnnnnnnnnnnnnnnnnnnnnnnnnnnnnnnnnnnnnnnnnnnnnnnnnnnnnnnnnnnnnnnnnnnnnnnnnnnnnnnnnnnnnnnnnnnnnnnnnnnnnnnnnnnnnnnnnnnnnnnnnnnnnnnnnnnnnnnnnnnnnnnnnnnnnnnnnnnnnnnnnnnnnnnnnnnnnnnnnnnnnnnnnnnnnnnnnnnnnnnnnnnnnnnnnnnnnnnnnnnnnnnnnnnnnnnnnnnnnnnnnnnnnnnnnnnnnnnnnnnnnnnnnnnnnnnnnnnnnnnnnnnnnnnnnnnnnnnnnnnnnnnnnnnnnnnnnnnnnnnnnnnnnnnnnnnnnnnnnnnnnnnnnnnnnnnnnnnnnnnnnnnnnnnnnnnnnnnnnnnnnnnnnnnnnnnnnnnnnnnnnnnnnnnnnnnnnnnnnnnnnnnnnnnnnnnnnnnnnnnnnnnnnnnnnnnnnnnnnnnnnnnnnnnnnnnnnnnnnnnnnnnnnnnnnnnnnnnnnnnnnnnnnnnnnnnnnnnnnnnnnnnnnnnnnnnnnnnnnnnnnnnnnnnnnnnnnnnnnnnnnnnnnnnnnnnnnnnnnnnnnnnnnnnnnnnnnnnnnnnnnnnnnnnnnnnnnnnnnnnnnnnnnnnnnnnnnnnnnnnnnnnnnnnnnnnnnnnnnnnnnnnnnnnnnnnnnnnnnnnnnnnnnnnnnnnnnnnnnnnnnnnnnnnnnnnnnnnnnnnnnnnnnnnnnnnnnnnnnnnnnnnnnnnnnnnnnnnnnnnnnnnnnnnnnnnnnnnnnnnnnnnnnnnnnnnnnnnnnnnnnnnnnnnnnnnnnnnnnnnnnnnnnnnnnnnnnnnnnnnnnnnnnnnnnnnnnnnnnnnnnnnnnnnnnnnnnnnnnnnnnnnnnnnnnnnnnnnnnnnnnnnnnnnnnnnnnnnnnnnnnnnnnnnnnnnnnnnnnnnnnnnnnnnnnnnnnnnnnnnnnnnnnnnnnnnnnnnnnnnnnnnnnnnnnnnnnnnnnnnnnnnnnnnnnnnnnnnnnnnnnnnnnnnnnnnnnnnnnnnnnnnnnnnnnnnnnnnnnnnnnnnnnnnnnnnnnnnnnnnnnnnnnnnnnnnnnnnnnnnnnnnnnnnnnnnnnnnnnnnnnnnnnnnnnnnnnnnnnnnnnnnnnnnnnnnnnnnnnnnnnnnnnnnnnnnnnnnnnnnnnnnnnnnnnnnnnnnnnnnnnnnnnnnnnnnnnnnnnnnnnnnnnnnnnnnnnnnnnnnnnnnnnnnnnnnnnnnnnnnnnnnnnnnnnnnnnnnnnnnnnnnnnnnnnnnnnnnnnnnnnnnnnnnnnnnnnnnnnnnnnnnnnnnnnnnnnnnnnnnnnnnnnnnnnnnnnnnnnnnnnnnnnnnnnnnnnnnnnnnnnnnnnnnnnnnnnnnnnnnnnnnnnnnnnnnnnnnnnnnnnnnnnnnnnnnnnnnnnnnnnnnnnnnnnnnnnnnnnnnnnnnnnnnnnnnnnnnnnnnnnnnnnnnnnnnnnnnnnnnnnnnnnnnnnnnnnnnnnnnnnnnnnnnnnnnnnnnnnnnnnnnnnnnnnnnnnnnnnnnnnnnnnnnnnnnnnnnnnnnnnnnnnnnnnnnnnnnnnnnnnnnnnnnnnnnnnnnnnnnnnnnnnnnnnnnnnnnnnnnnnnnnnnnnnnnnnnnnnnnnnnnnnnnnnnnnnnnnnnnnnnnnnnnnnnnnnnnnnnnnnnnnnnnnnnnnnnnnnnnnnnnnnnnnnnnnnnnnnnnnnnnnnnnnnnnnnnnnnnnnnnnnnnnnnnnnnnnnnnnnnnnnnnnnnnnnnnnnnnnnnnnnnnnnnnnnnnnnnnnnnnnnnnnnnnnnnnnnnnnnnnnnnnnnnnnnnnnnnnnnnnnnnnnnnnnnnnnnnnnnnnnnnnnnnnnnnnnnnnnnnnnnnnnnnnnnnnnnnnnnnnnnnnnnnnnnnnnnnnnnnnnnnnnnnnnnnnnnnnnnnnnnnnnnnnnnnnnnnnnnnnnnnnnnnnnnnnnnnnnnnnnnnnnnnnnnnnnnnnnnnnnnnnnnnnnnnnnnnnnnnnnnnnnnnnnnnnnnnnnnnnnnnnnnnnnnnnnnnnnnnnnnnnnnnnnnnnnnnnnnnnnnnnnnnnnnnnnnnnnnnnnnnnnnnnnnnnnnnnnnnnnnnnnnnnnnnnnnnnnnnnnnnnnnnnnnnnnnnnnnnnnnnnnnnnnnnnnnnnnnnnnnnnnnnnnnnnnnnnnnnnnnnnnnnnnnnnnnnnnnnnnnnnnnnnnnnnnnnnnnnnnnnnnnnnnnnnnnnnnnnnnnnnnnnnnnnnnnnnnnnnnnnnnnnnnnnnnnnnnnnnnnnnnnnnnnnnnnnnnnnnnnnnnnnnnnnnnnnnnnnnnnnnnnnnnnnnnnnnnnnnnnnnnnnnnnnnnnnnnnnnnnnnnnnnnnnnnnnnnnnnnnnnnnnnnnnnnnnnnnnnnnnnnnnnnnnnnnnnnnnnnnnnnnnnnnnnnnnnnnnnnnnnnnnnnnnnnnnnnnnnnnnnnnnnnnnnnnnnnnnnnnnnnnnnnnnnnnnnnnnnnnnnnnnnnnnnnnnnnnnnnnnnnnnnnnnnnnnnnnnnnnnnnnnnnnnnnnnnnnnnnnnnnnnnnnnnnnnnnnnnnnnnnnnnnnnnnnnnnnnnnnnnnnnnnnnnnnnnnnnnnnnnnnnnnnnnnnnnnnnnnnnnnnnnnnnnnnnnnnnnnnnnnnnnnnnnnnnnnnnnnnnnnnnnnnnnnnnnnnnnnnnnnnnnnnnnnnnnnnnnnnnnnnnnnnnnnnnnnnnnnnnnnnnnnnnnnnnnnnnnnnnnnnnnnnnnnnnnnnnnnnnnnnnnnnnnnnnnnnnnnnnnnnnnnnnnnnnnnnnnnnnnnnnnnnnnnnnnnnnnnnnnnnnnnnnnnnnnnnnnnnnnnnnnnnnnnnnnnnnnnnnnnnnnnnnnnnnnnnnnnnnnnnnnnnnnnnnnnnnnnnnnnnnnnnnnnnnnnnnnnnnnnnnnnnnnnnnnnnnnnnnnnnnnnnnnnnnnnnnnnnnnnnnnnnnnnnnnnnnnnnnnnnnnnnnnnnnnnnnnnnnnnnnnnnnnnnnnnnnnnnnnnnnnnnnnnnnnnnnnnnnnnnnnnnnnnnnnnnnnnnnnnnnnnnnnnnnnnnnnnnnnnnnnnnnnnnnnnnnnnnnnnnnnnnnnnnnnnnnnnnnnnnnnnnnnnnnnnnnnnnnnnnnnnnnnnnnnnnnnnnnnnnnnnnnnnnnnnnnnnnnnnnnnnnnnnnnnnnnnnnnnnnnnnnnnnnnnnnnnnnnnnnnnnnnnnnnnnnnnnnnnnnnnnnnnnnnnnnnnnnnnnnnnnnnnnnnnnnnnnnnnnnnnnnnnnnnnnnnnnnnnnnnnnnnnnnnnnnnnnnnnnnnnnnnnnnnnnnnnnnnnnnnnnnnnnnnnnnnnnnnnnnnnnnnnnnnnnnnnnnnnnnnnnnnnnnnnnnnnnnnnnnnnnnnnnnnnnnnnnnnnnnnnnnnnnnnnnnnnnnnnnnnnnnnnnnnnnnnnnnnnnnnnnnnnnnnnnnnnnnnnnnnnnnnnnnnnnnnnnnnnnnnnnnnnnnnnnnnnnnnnnnnnnnnnnnnnnnnnnnnnnnnnnnnnnnnnnnnnnnnnnnnnnnnnnnnnnnnnnnnnnnnnnnnnnnnnnnnnnnnnnnnnnnnnnnnnnnnnnnnnnnnnnnnnnnnnnnnnnnnnnnnnnnnnnnnnnnnnnnnnnnnnnnnnnnnnnnnnnnnnnnnnnnnnnnnnnnnnnnnnnnnnnnnnnnnnnnnnnnnnnnnnnnnnnnnnnnnnnnnnnnnnnnnnnnnnnnnnnnnnnnnnnnnnnnnnnnnnnnnnnnnnnnnnnnnnnnnnnnnnnnnnnnnnnnnnnnnnnnnnnnnnnnnnnnnnnnnnnnnnnnnnnnnnnnnnnnnnnnnnnnnnnnnnnnnnnnnnnnnnnnnnnnnnnnnnnnnnnnnnnnnnnnnnnnnnnnnnnnnnnnnnnnnnnnnnnnnnnnnnnnnnnnnnnnnnnnnnnnnnnnnnnnnnnnnnnnnnnnnnnnnnnnnnnnnnnnnnnnnnnnnnnnnnnnnnnnnnnnnnnnnnnnnnnnnnnnnnnnnnnnnnnnnnnnnnnnnnnnnnnnnnnnnnnnnnnnnnnnnnnnnnnnnnnnnnnnnnnnnnnnnnnnnnnnnnnnnnnnnnnnnnnnnnnnnnnnnnnnnnnnnnnnnnnnnnnnnnnnnnnnnnnnnnnnnnnnnnnnnnnnnnnnnnnnnnnnnnnnnnnnnnnnnnnnnnnnnnnnnnnnnnnnnnnnnnnnnnnnnnnnnnnnnnnnnnnnnnnnnnnnnnnnnnnnnnnnnnnnnnnnnnnnnnnnnnnnnnnnnnnnnnnnnnnnnnnnnnnnnnnnnnnnnnnnnnnnnnnnnnnnnnnnnnnnnnnnnnnnnnnnnnnnnnnnnnnnnnnnnnnnnnnnnnnnnnnnnnnnnnnnnnnnnnnnnnnnnnnnnnnnnnnnnnnnnnnnnnnnnnnnnnnnnnnnnnnnnnnnnnnnnnnnnnnnnnnnnnnnnnnnnnnnnnnnnnnnnnnnnnnnnnnnnnnnnnnnnnnnnnnnnnnnnnnnnnnnnnnnnnnnnnnnnnnnnnnnnnnnnnnnnnnnnnnnnnnnnnnnnnnnnnnnnnnnnnnnnnnnnnnnnnnnnnnnnnnnnnnnnnnnnnnnnnnnnnnnnnnnnnnnnnnnnnnnnnnnnnnnnnnnnnnnnnnnnnnnnnnnnnnnnnnnnnnnnnnnnnnnnnnnnnnnnnnnnnnnnnnnnnnnnnnnnnnnnnnnnnnnnnnnnnnnnnnnnnnnnnnnnnnnnnnnnnnnnnnnnnnnnnnnnnnnnnnnnnnnnnnnnnnnnnnnnnnnnnnnnnnnnnnnnnnnnnnnnnnnnnnnnnnnnnnnnnnnnnnnnnnnnnnnnnnnnnnnnnnnnnnnnnnnnnnnnnnnnnnnnnnnnnnnnnnnnnnnnnnnnnnnnnnnnnnnnnnnnnnnnnnnnnnnnnnnnnnnnnnnnnnnnnnnnnnnnnnnnnnnnnnnnnnnnnnnnnnnnnnnnnnnnnnnnnnnnnnnnnnnnnnnnnnnnnnnnnnnnnnnnnnnnnnnnnnnnnnnnnnnnnnnnnnnnnnnnnnnnnnnnnnnnnnnnnnnnnnnnnnnnnnnnnnnnnnnnnnnnnnnnnnnnnnnnnnnnnnnnnnnnnnnnnnnnnnnnnnnnnnnnnnnnnnnnnnnnnnnnnnnnnnnnnnnnnnnnnnnnnnnnnnnnnnnnnnnnnnnnnnnnnnnnnnnnnnnnnnnnnnnnnnnnnnnnnnnnnnnnnnnnnnnnnnnnnnnnnnnnnnnnnnnnnnnnnnnnnnnnnnnnnnnnnnnnnnnnnnnnnnnnnnnnnnnnnnnnnnnnnnnnnnnnnnnnnnnnnnnnnnnnnnnnnnnnnnnnnnnnnnnnnnnnnnnnnnnnnnnnnnnnnnnnnnnnnnnnnnnnnnnnnnnnnnnnnnnnnnnnnnnnnnnnnnnnnnnnnnnnnnnnnnnnnnnnnnnnnnnnnnnnnnnnnnnnnnnnnnnnnnnnnnnnnnnnnnnnnnnnnnnnnnnnnnnnnnnnnnnnnnnnnnnnnnnnnnnnnnnnnnnnnnnnnnnnnnnnnnnnnnnnnnnnnnnnnnnnnnnnnnnnnnnnnnnnnnnnnnnnnnnnnnnnnnnnnnnnnnnnnnnnnnnnnnnnnnnnnnnnnnnnnnnnnnnnnnnnnnnnnnnnnnnnnnnnnnnnnnnnnnnnnnnnnnnnnnnnnnnnnnnnnnnnnnnnnnnnnnnnnnnnnnnnnnnnnnnnnnnnnnnnnnnnnnnnnnnnnnnnnnnnnnnnnnnnnnnnnnnnnnnnnnnnnnnnnnnnnnnnnnnnnnnnnnnnnnnnnnnnnnnnnnnnnnnnnnnnnnnnnnnnnnnnnnnnnnnnnnnnnnnnnnnnnnnnnnnnnnnnnnnnnnnnnnnnnnnnnnnnnnnnnnnnnnnnnnnnnnnnnnnnnnnnnnnnnnnnnnnnnnnnnnnnnnnnnnnnnnnnnnnnnnnnnnnnnnnnnnnnnnnnnnnnnnnnnnnnnnnnnnnnnnnnnnnnnnnnnnnnnnnnnnnnnnnnnnnnnnnnnnnnnnnnnnnnnnnnnnnnnnnnnnnnnnnnnnnnnnnnnnnnnnnnnnnnnnnnnnnnnnnnnnnnnnnnnnnnnnnnnnnnnnnnnnnnnnnnnnnnnnnnnnnnnnnnnnnnnnnnnnnnnnnnnnnnnnnnnnnnnnnnnnnnnnnnnnnnnnnnnnnnnnnnnnnnnnnnnnnnnnnnnnnnnnnnnnnnnnnnnnnnnnnnnnnnnnnnnnnnnnnnnnnnnnnnnnnnnnnnnnnnnnnnnnnnnnnnnnnnnnnnnnnnnnnnnnnnnnnnnnnnnnnnnnnnnnnnnnnnnnnnnnnnnnnnnnnnnnnnnnnnnnnnnnnnnnnnnnnnnnnnnnnnnnnnnnnnnnnnnnnnnnnnnnnnnnnnnnnnnnnnnnnnnnnnnnnnnnnnnnnnnnnnnnnnnnnnnnnnnnnnnnnnnnnnnnnnnnnnnnnnnnnnnnnnnnnnnnnnnnnnnnnnnnnnnnnnnnnnnnnnnnnnnnnnnnnnnnnnnnnnnnnnnnnnnnnnnnnnnnnnnnnnnnnnnnnnnnnnnnnnnnnnnnnnnnnnnnnnnnnnnnnnnnnnnnnnnnnnnnnnnnnnnnnnnnnnnnnnnnnnnnnnnnnnnnnnnnnnnnnnnnnnnnnnnnnnnnnnnnnnnnnnnnnnnnnnnnnnnnnnnnnnnnnnnnnnnnnnnnnnnnnnnnnnnnnnnnnnnnnnnnnnnnnnnnnnnnnnnnnnnnnnnnnnnnnnnnnnnnnnnnnnnnnnnnnnnnnnnnnnnnnnnnnnnnnnnnnnnnnnnnnnnnnnnnnnnnnnnnnnnnnnnnnnnnnnnnnnnnnnnnnnnnnnnnnnnnnnnnnnnnnnnnnnnnnnnnnnnnnnnnnnnnnnnnnnnnnnnnnnnnnnnnnnnnnnnnnnnnnnnnnnnnnnnnnnnnnnnnnnnnnnnnnnnnnnnnnnnnnnnnnnnnnnnnnnnnnnnnnnnnnnnnnnnnnnnnnnnnnnnnnnnnnnnnnnnnnnnnnnnnnnnnnnnnnnnnnnnnnnnnnnnnnnnnnnnnnnnnnnnnnnnnnnnnnnnnnnnnnnnnnnnnnnnnnnnnnnnnnnnnnnnnnnnnnnnnnnnnnnnnnnnnnnnnnnnnnnnnnnnnnnnnnnnnnnnnnnnnnnnnnnnnnnnnnnnnnnnnnnnnnnnnnnnnnnnnnnnnnnnnnnnnnnnnnnnnnnnnnnnnnnnnnnnnnnnnnnnnnnnnnnnnnnnnnnnnnnnnnnnnnnnnnnnnnnnnnnnnnnnnnnnnnnnnnnnnnnnnnnnnnnnnnnnnnnnnnnnnnnnnnnnnnnnnnnnnnnnnnnnnnnnnnnnnnnnnnnnnnnnnnnnnnnnnnnnnnnnnnnnnnnnnnnnnnnnnnnnnnnnnnnnnnnnnnnnnnnnnnnnnnnnnnnnnnnnnnnnnnnnnnnnnnnnnnnnnnnnnnnnnnnnnnnnnnnnnnnnnnnnnnnnnnnnnnnnnnnnnnnnnnnnnnnnnnnnnnnnnnnnnnnnnnnnnnnnnnnnnnnnnnnnnnnnnnnnnnnnnnnnnnnnnnnnnnnnnnnnnnnnnnnnnnnnnnnnnnnnnnnnnnnnnnnnnnnnnnnnnnnnnnnnnnnnnnnnnnnnnnnnnnnnnnnnnnnnnnnnnnnnnnnnnnnnnnnnnnnnnnnnnnnnnnnnnnnnnnnnnnnnnnnnnnnnnnnnnnnnnnnnnnnnnnnnnnnnnnnnnnnnnnnnnnnnnnnnnnnnnnnnnnnnnnnnnnnnnnnnnnnnnnnnnnnnnnnnnnnnnnnnnnnnnnnnnnnnnnnnnnnnnnnnnnnnnnnnnnnnnnnnnnnnnnnnnnnnnnnnnnnnnnnnnnnnnnnnnnnnnnnnnnnnnnnnnnnnnnnnnnnnnnnnnnnnnnnnnnnnnnnnnnnnnnnnnnnnnnnnnnnnnnnnnnnnnnnnnnnnnnnnnnnnnnnnnnnnnnnnnnnnnnnnnnnnnnnnnnnnnnnnnnnnnnnnnnnnnnnnnnnnnnnnnnnnnnnnnnnnnnnnnnnnnnnnnnnnnnnnnnnnnnnnnnnnnnnnnnnnnnnnnnnnnnnnnnnnnnnnnnnnnnnnnnnnnnnnnnnnnnnnnnnnnnnnnnnnnnnnnnnnnnnnnnnnnnnnnnnnnnnnnnnnnnnnnnnnnnnnnnnnnnnnnnnnnnnnnnnnnnnnnnnnnnnnnnnnnnnnnnnnnnnnnnnnnnnnnnnnnnnnnnnnnnnnnnnnnnnnnnnnnnnnnnnnnnnnnnnnnnnnnnnnnnnnnnnnnnnnnnnnnnnnnnnnnnnnnnnnnnnnnnnnnnnnnnnnnnnnnnnnnnnnnnnnnnnnnnnnnnnnnnnnnnnnnnnnnnnnnnnnnnnnnnnnnnnnnnnnnnnnnnnnnnnnnnnnnnnnnnnnnnnnnnnnnnnnnnnnnnnnnnnnnnnnnnnnnnnnnnnnnnnnnnnnnnnnnnnnnnnnnnnnnnnnnnnnnnnnnnnnnnnnnnnnnnnnnnnnnnnnnnnnnnnnnnnnnnnnnnnnnnnnnnnnnnnnnnnnnnnnnnnnnnnnnnnnnnnnnnnnnnnnnnnnnnnnnnnnnnnnnnnnnnnnnnnnnnnnnnnnnnnnnnnnnnnnnnnnnnnnnnnnnnnnnnnnnnnnnnnnnnnnnnnnnnnnnnnnnnnnnnnnnnnnnnnnnnnnnnnnnnnnnnnnnnnnnnnnnnnnnnnnnnnnnnnnnnnnnnnnnnnnnnnnnnnnnnnnnnnnnnnnnnnnnnnnnnnnnnnnnnnnnnnnnnnnnnnnnnnnnnnnnnnnnnnnnnnnnnnnnnnnnnnnnnnnnnnnnnnnnnnnnnnnnnnnnnnnnnnnnnnnnnnnnnnnnnnnnnnnnnnnnnnnnnnnnnnnnnnnnnnnnnnnnnnnnnnnnnnnnnnnnnnnnnnnnnnnnnnnnnnnnnnnnnnnnnnnnnnnnnnnnnnnnnnnnnnnnnnnnnnnnnnnnnnnnnnnnnnnnnnnnnnnnnnnnnnnnnnnnnnnnnnnnnnnnnnnnnnnnnnnnnnnnnnnnnnnnnnnnnnnnnnnnnnnnnnnnnnnnnnnnnnnnnnnnnnnnnnnnnnnnnnnnnnnnnnnnnnnnnnnnnnnnnnnnnnnnnnnnnnnnnnnnnnnnnnnnnnnnnnnnnnnnnnnnnnnnnnnnnnnnnnnnnnnnnnnnnnnnnnnnnnnnnnnnnnnnnnnnnnnnnnnnnnnnnnnnnnnnnnnnnnnnnnnnnnnnnnnnnnnnnnnnnnnnnnnnnnnnnnnnnnnnnnnnnnnnnnnnnnnnnnnnnnnnnnnnnnnnnnnnnnnnnnnnnnnnnnnnnnnnnnnnnnnnnnnnnnnnnnnnnnnnnnnnnnnnnnnnnnnnnnnnnnnnnnnnnnnnnnnnnnnnnnnnnnnnnnnnnnnnnnnnnnnnnnnnnnnnnnnnnnnnnnnnnnnnnnnnnnnnnnnnnnnnnnnnnnnnnnnnnnnnnnnnnnnnnnnnnnnnnnnnnnnnnnnnnnnnnnnnnnnnnnnnnnnnnnnnnnnnnnnnnnnnnnnnnnnnnnnnnnnnnnnnnnnnnnnnnnnnnnnnnnnnnnnnnnnnnnnnnnnnnnnnnnnnnnnnnnnnnnnnnnnnnnnnnnnnnnnnnnnnnnnnnnnnnnnnnnnnnnnnnnnnnnnnnnnnnnnnnnnnnnnnnnnnnnnnnnnnnnnnnnnnnnnnnnnnnnnnnnnnnnnnnnnnnnnnnnnnnnnnnnnnnnnnnnnnnnnnnnnnnnnnnnnnnnnnnnnnnnnnnnnnnnnnnnnnnnnnnnnnnnnnnnnnnnnnnnnnnnnnnnnnnnnnnnnnnnnnnnnnnnnnnnnnnnnnnnnnnnnnnnnnnnnnnnnnnnnnnnnnnnnnnnnnnnnnnnnnnnnnnnnnnnnnnnnnnnnnnnnnnnnnnnnnnnnnnnnnnnnnnnnnnnnnnnnnnnnnnnnnnnnnnnnnnnnnnnnnnnnnnnnnnnnnnnnnnnnnnnnnnnnnnnnnnnnnnnnnnnnnnnnnnnnnnnnnnnnnnnnnnnnnnnnnnnnnnnnnnnnnnnnnnnnnnnnnnnnnnnnnnnnnnnnnnnnnnnnnnnnnnnnnnnnnnnnnnnnnnnnnnnnnnnnnnnnnnnnnnnnnnnnnnnnnnnnnnnnnnnnnnnnnnnnnnnnnnnnnnnnnnnnnnnnnnnnnnnnnnnnnnnnnnnnnnnnnnnnnnnnnnnnnnnnnnnnnnnnnnnnnnnnnnnnnnnnnnnnnnnnnnnnnnnnnnnnnnnnnnnnnnnnnnnnnnnnnnnnnnnnnnnnnnnnnnnnnnnnnnnnnnnnnnnnnnnnnnnnnnnnnnnnnnnnnnnnnnnnnnnnnnnnnnnnnnnnnnnnnnnnnnnnnnnnnnnnnnnnnnnnnnnnnnnnnnnnnnnnnnnnnnnnnnnnnnnnnnnnnnnnnnnnnnnnnnnnnnnnnnnnnnnnnnnnnnnnnnnnnnnnnnnnnnnnnnnnnnnnnnnnnnnnnnnnnnnnnnnnnnnnnnnnnnnnnnnnnnnnnnnnnnnnnnnnnnnnnnnnnnnnnnnnnnnnnnnnnnnnnnnnnnnnnnnnnnnnnnnnnnnnnnnnnnnnnnnnnnnnnnnnnnnnnnnnnnnnnnnnnnnnnnnnnnnnnnnnnnnnnnnnnnnnnnnnnnnnnnnnnnnnnnnnnnnnnnnnnnnnnnnnnnnnnnnnnnnnnnnnnnnnnnnnnnnnnnnnnnnnnnnnnnnnnnnnnnnnnnnnnnnnnnnnnnnnnnnnnnnnnnnnnnnnnnnnnnnnnnnnnnnnnnnnnnnnnnnnnnnnnnnnnnnnnnnnnnnnnnnnnnnnnnnnnnnnnnnnnnnnnnnnnnnnnnnnnnnnnnnnnnnnnnnnnnnnnnnnnnnnnnnnnnnnnnnnnnnnnnnnnnnnnnnnnnnnnnnnnnnnnnnnnnnnnnnnnnnnnnnnnnnnnnnnnnnnnnnnnnnnnnnnnnnnnnnnnnnnnnnnnnnnnnnnnnnnnnnnnnnnnnnnnnnnnnnnnnnnnnnnnnnnnnnnnnnnnnnnnnnnnnnnnnnnnnnnnnnnnnnnnnnnnnnnnnnnnnnnnnnnnnnnnnnnnnnnnnnnnnnnnnnnnnnnnnnnnnnnnnnnnnnnnnnnnnnnnnnnnnnnnnnnnnnnnnnnnnnnnnnnnnnnnnnnnnnnnnnnnnnnnnnnnnnnnnnnnnnnnnnnnnnnnnnnnnnnnnnnnnnnnnnnnnnnnnnnnnnnnnnnnnnnnnnnnnnnnnnnnnnnnnnnnnnnnnnnnnnnnnnnnnnnnnnnnnnnnnnnnnnnnnnnnnnnnnnnnnnnnnnnnnnnnnnnnnnnnnnnnnnnnnnnnnnnnnnnnnnnnnnnnnnnnnnnnnnnnnnnnnnnnnnnnnnnnnnnnnnnnnnnnnnnnnnnnnnnnnnnnnnnnnnnnnnnnnnnnnnnnnnnnnnnnnnnnnnnnnnnnnnnnnnnnnnnnnnnnnnnnnnnnnnnnnnnnnnnnnnnnnnnnnnnnnnnnnnnnnnnnnnnnnnnnnnnnnnnnnnnnnnnnnnnnnnnnnnnnnnnnnnnnnnnnnnnnnnnnnnnnnnnnnnnnnnnnnnnnnnnnnnnnnnnnnnnnnnnnnnnnnnnnnnnnnnnnnnnnnnnnnnnnnnnnnnnnnnnnnnnnnnnnnnnnnnnnnnnnnnnnnnnnnnnnnnnnnnnnnnnnnnnnnnnnnnnnnnnnnnnnnnnnnnnnnnnnnnnnnnnnnnnnnnnnnnnnnnnnnnnnnnnnnnnnnnnnnnnnnnnnnnnnnnnnnnnnnnnnnnnnnnnnnnnnnnnnnnnnnnnnnnnnnnnnnnnnnnnnnnnnnnnnnnnnnnnnnnnnnnnnnnnnnnnnnnnnnnnnnnnnnnnnnnnnnnnnnnnnnnnnnnnnnnnnnnnnnnnnnnnnnnnnnnnnnnnnnnnnnnnnnnnnnnnnnnnnnnnnnnnnnnnnnnnnnnnnnnnnnnnnnnnnnnnnnnnnnnnnnnnnnnnnnnnnnnnnnnnnnnnnnnnnnnnnnnnnnnnnnnnnnnnnnnnnnnnnnnnnnnnnnnnnnnnnnnnnnnnnnnnnnnnnnnnnnnnnnnnnnnnnnnnnnnnnnnnnnnnnnnnnnnnnnnnnnnnnnnnnnnnnnnnnnnnnnnnnnnnnnnnnnnnnnnnnnnnnnnnnnnnnnnnnnnnnnnnnnnnnnnnnnnnnnnnnnnnnnnnnnnnnnnnnnnnnnnnnnnnnnnnnnnnnnnnnnnnnnnnnnnnnnnnnnnnnnnnnnnnnnnnnnnnnnnnnnnnnnnnnnnnnnnnnnnnnnnnnnnnnnnnnnnnnnnnnnnnnnnnnnnnnnnnnnnnnnnnnnnnnnnnnnnnnnnnnnnnnnnnnnnnnnnnnnnnnnnnnnnnnnnnnnnnnnnnnnnnnnnnnnnnnnnnnnnnnnnnnnnnnnnnnnnnnnnnnnnnnnnnnnnnnnnnnnnnnnnnnnnnnnnnnnnnnnnnnnnnnnnnnnnnnnnnnnnnnnnnnnnnnnnnnnnnnnnnnnnnnnnnnnnnnnnnnnnnnnnnnnnnnnnnnnnnnnnnnnnnnnnnnnnnnnnnnnnnnnnnnnnnnnnnnnnnnnnnnnnnnnnnnnnnnnnnnnnnnnnnnnnnnnnnnnnnnnnnnnnnnnnnnnnnnnnnnnnnnnnnnnnnnnnnnnnnnnnnnnnnnnnnnnnnnnnnnnnnnnnnnnnnnnnnnnnnnnnnnnnnnnnnnnnnnnnnnnnnnnnnnnnnnnnnnnnnnnnnnnnnnnnnnnnnnnnnnnnnnnnnnnnnnnnnnnnnnnnnnnnnnnnnnnnnnnnnnnnnnnnnnnnnnnnnnnnnnnnnnnnnnnnnnnnnnnnnnnnnnnnnnnnnnnnnnnnnnnnnnnnnnnnnnnnnnnnnnnnnnnnnnnnnnnnnnnnnnnnnnnnnnnnnnnnnnnnnnnnnnnnnnnnnnnnnnnnnnnnnnnnnnnnnnnnnnnnnnnnnnnnnnnnnnnnnnnnnnnnnnnnnnnnnnnnnnnnnnnnnnnnnnnnnnnnnnnnnnnnnnnnnnnnnnnnnnnnnnnnnnnnnnnnnnnnnnnnnnnnnnnnnnnnnnnnnnnnnnnnnnnnnnnnnnnnnnnnnnnnnnnnnnnnnnnnnnnnnnnnnnnnnnnnnnnnnnnnnnnnnnnnnnnnnnnnnnnnnnnnnnnnnnnnnnnnnnnnnnnnnnnnnnnnnnnnnnnnnnnnnnnnnnnnnnnnnnnnnnnnnnnnnnnnnnnnnnnnnnnnnnnnnnnnnnnnnnnnnnnnnnnnnnnnnnnnnnnnnnnnnnnnnnnnnnnnnnnnnnnnnnnnnnnnnnnnnnnnnnnnnnnnnnnnnnnnnnnnnnnnnnnnnnnnnnnnnnnnnnnnnnnnnnnnnnnnnnnnnnnnnnnnnnnnnnnnnnnnnnnnnnnnnnnnnnnnnnnnnnnnnnnnnnnnnnnnnnnnnnnnnnnnnnnnnnnnnnnnnnnnnnnnnnnnnnnnnnnnnnnnnnnnnnnnnnnnnnnnnnnnnnnnnnnnnnnnnnnnnnnnnnnnnnnnnnnnnnnnnnnnnnnnnnnnnnnnnnnnnnnnnnnnnnnnnnnnnnnnnnnnnnnnnnnnnnnnnnnnnnnnnnnnnnnnnnnnnnnnnnnnnnnnnnnnnnnnnnnnnnnnnnnnnnnnnnnnnnnnnnnnnnnnnnnnnnnnnnnnnnnnnnnnnnnnnnnnnnnnnnnnnnnnnnnnnnnnnnnnnnnnnnnnnnnnnnnnnnnnnnnnnnnnnnnnnnnnnnnnnnnnnnnnnnnnnnnnnnnnnnnnnnnnnnnnnnnnnnnnnnnnnnnnnnnnnnnnnnnnnnnnnnnnnnnnnnnnnnnnnnnnnnnnnnnnnnnnnnnnnnnnnnnnnnnnnnnnnnnnnnnnnnnnnnnnnnnnnnnnnnnnnnnnnnnnnnnnnnnnnnnnnnnnnnnnnnnnnnnnnnnnnnnnnnnnnnnnnnnnnnnnnnnnnnnnnnnnnnnnnnnnnnnnnnnnnnnnnnnnnnnnnnnnnnnnnnnnnnnnnnnnnnnnnnnnnnnnnnnnnnnnnnnnnnnnnnnnnnnnnnnnnnnnnnnnnnnnnnnnnnnnnnnnnnnnnnnnnnnnnnnnnnnnnnnnnnnnnnnnnnnnnnnnnnnnnnnnnnnnnnnnnnnnnnnnnnnnnnnnnnnnnnnnnnnnnnnnnnnnnnnnnnnnnnnnnnnnnnnnnnnnnnnnnnnnnnnnnnnnnnnnnnnnnnnnnnnnnnnnnnnnnnnnnnnnnnnnnnnnnnnnnnnnnnnnnnnnnnnnnnnnnnnnnnnnnnnnnnnnnnnnnnnnnnnnnnnnnnnnnnnnnnnnnnnnnnnnnnnnnnnnnnnnnnnnnnnnnnnnnnnnnnnnnnnnnnnnnnnnnnnnnnnnnnnnnnnnnnnnnnnnnnnnnnnnnnnnnnnnnnnnnnnnnnnnnnnnnnnnnnnnnnnnnnnnnnnnnnnnnnnnnnnnnnnnnnnnnnnnnnnnnnnnnnnnnnnnnnnnnnnnnnnnnnnnnnnnnnnnnnnnnnnnnnnnnnnnnnnnnnnnnnnnnnnnnnnnnnnnnnnnnnnnnnnnnnnnnnnnnnnnnnnnnnnnnnnnnnnnnnnnnnnnnnnnnnnnnnnnnnnnnnnnnnnnnnnnnnnnnnnnnnnnnnnnnnnnnnnnnnnnnnnnnnnnnnnnnnnnnnnnnnnnnnnnnnnnnnnnnnnnnnnnnnnnnnnnnnnnnnnnnnnnnnnnnnnnnnnnnnnnnnnnnnnnnnnnnnnnnnnnnnnnnnnnnnnnnnnnnnnnnnnnnnnnnnnnnnnnnnnnnnnnnnnnnnnnnnnnnnnnnnnnnnnnnnnnnnnnnnnnnnnnnnnnnnnnnnnnnnnnnnnnnnnnnnnnnnnnnnnnnnnnnnnnnnnnnnnnnnnnnnnnnnnnnnnnnnnnnnnnnnnnnnnnnnnnnnnnnnnnnnnnnnnnnnnnnnnnnnnnnnnnnnnnnnnnnnnnnnnnnnnnnnnnnnnnnnnnnnnnnnnnnnnnnnnnnnnnnnnnnnnnnnnnnnnnnnnnnnnnnnnnnnnnnnnnnnnnnnnnnnnnnnnnnnnnnnnnnnnnnnnnnnnnnnnnnnnnnnnnnnnnnnnnnnnnnnnnnnnnnnnnnnnnnnnnnnnnnnnnnnnnnnnnnnnnnnnnnnnnnnnnnnnnnnnnnnnnnnnnnnnnnnnnnnnnnnnnnnnnnnnnnnnnnnnnnnnnnnnnnnnnnnnnnnnnnnnnnnnnnnnnnnnnnnnnnnnnnnnnnnnnnnnnnnnnnnnnnnnnnnnnnnnnnnnnnnnnnnnnnnnnnnnnnnnnnnnnnnnnnnnnnnnnnnnnnnnnnnnnnnnnnnnnnnnnnnnnnnnnnnnnnnnnnnnnnnnnnnnnnnnnnnnnnnnnnnnnnnnnnnnnnnnnnnnnnnnnnnnnnnnnnnnnnnnnnnnnnnnnnnnnnnnnnnnnnnnnnnnnnnnnnnnnnnnnnnnnnnnnnnnnnnnnnnnnnnnnnnnnnnnnnnnnnnnnnnnnnnnnnnnnnnnnnnnnnnnnnnnnnnnnnnnnnnnnnnnnnnnnnnnnnnnnnnnnnnnnnnnnnnnnnnnnnnnnnnnnnnnnnnnnnnnnnnnnnnnnnnnnnnnnnnnnnnnnnnnnnnnnnnnnnnnnnnnnnnnnnnnnnnnnnnnnnnnnnnnnnnnnnnnnnnnnnnnnnnnnnnnnnnnnnnnnnnnnnnnnnnnnnnnnnnnnnnnnnnnnnnnnnnnnnnnnnnnnnnnnnnnnnnnnnnnnnnnnnnnnnnnnnnnnnnnnnnnnnnnnnnnnnnnnnnnnnnnnnnnnnnnnnnnnnnnnnnnnnnnnnnnnnnnnnnnnnnnnnnnnnnnnnnnnnnnnnnnnnnnnnnnnnnnnnnnnnnnnnnnnnnnnnnnnnnnnnnnnnnnnnnnnnnnnnnnnnnnnnnnnnnnnnnnnnnnnnnnnnnnnnnnnnnnnnnnnnnnnnnnnnnnnnnnnnnnnnnnnnnnnnnnnnnnnnnnnnnnnnnnnnnnnnnnnnnnnnnnnnnnnnnnnnnnnnnnnnnnnnnnnnnnnnnnnnnnnnnnnnnnnnnnnnnnnnnnnnnnnnnnnnnnnnnnnnnnnnnnnnnnnnnnnnnnnnnnnnnnnnnnnnnnnnnnnnnnnnnnnnnnnnnnnnnnnnnnnnnnnnnnnnnnnnnnnnnnnnnnnnnnnnnnnnnnnnnnnnnnnnnnnnnnnnnnnnnnnnnnnnnnnnnnnnnnnnnnnnnnnnnnnnnnnnnnnnnnnnnnnnnnnnnnnnnnnnnnnnnnnnnnnnnnnnnnnnnnnnnnnnnnnnnnnnnnnnnnnnnnnnnnnnnnnnnnnnnnnnnnnnnnnnnnnnnnnnnnnnnnnnnnnnnnnnnnnnnnnnnnnnnnnnnnnnnnnnnnnnnnnnnnnnnnnnnnnnnnnnnnnnnnnnnnnnnnnnnnnnnnnnnnnnnnnnnnnnnnnnnnnnnnnnnnnnnnnnnnnnnnnnnnnnnnnnnnnnnnnnnnnnnnnnnnnnnnnnnnnnnnnnnnnnnnnnnnnnnnnnnnnnnnnnnnnnnnnnnnnnnnnnnnnnnnnnnnnnnnnnnnnnnnnnnnnnnnnnnnnnnnnnnnnnnnnnnnnnnnnnnnnnnnnnnnnnnnnnnnnnnnnnnnnnnnnnnnnnnnnnnnnnnnnnnnnnnnnnnnnnnnnnnnnnnnnnnnnnnnnnnnnnnnnnnnnnnnnnnnnnnnnnnnnnnnnnnnnnnnnnnnnnnnnnnnnnnnnnnnnnnnnnnnnnnnnnnnnnnnnnnnnnnnnnnnnnnnnnnnnnnnnnnnnnnnnnnnnnnnnnnnnnnnnnnnnnnnnnnnnnnnnnnnnnnnnnnnnnnnnnnnnnnnnnnnnnnnnnnnnnnnnnnnnnnnnnnnnnnnnnnnnnnnnnnnnnnnnnnnnnnnnnnnnnnnnnnnnnnnnnnnnnnnnnnnnnnnnnnnnnnnnnnnnnnnnnnnnnnnnnnnnnnnnnnnnnnnnnnnnnnnnnnnnnnnnnnnnnnnnnnnnnnnnnnnnnnnnnnnnnnnnnnnnnnnnnnnnnnnnnnnnnnnnnnnnnnnnnnnnnnnnnnnnnnnnnnnnnnnnnnnnnnnnnnnnnnnnnnnnnnnnnnnnnnnnnnnnnnnnnnnnnnnnnnnnnnnnnnnnnnnnnnnnnnnnnnnnnnnnnnnnnnnnnnnnnnnnnnnnnnnnnnnnnnnnnnnnnnnnnnnnnnnnnnnnnnnnnnnnnnnnnnnnnnnnnnnnnnnnnnnnnnnnnnnnnnnnnnnnnnnnnnnnnnnnnnnnnnnnnnnnnnnnnnnnnnnnnnnnnnnnnnnnnnnnnnnnnnnnnnnnnnnnnnnnnnnnnnnnnnnnnnnnnnnnnnnnnnnnnnnnnnnnnnnnnnnnnnnnnnnnnnnnnnnnnnnnnnnnnnnnnnnnnnnnnnnnnnnnnnnnnnnnnnnnnnnnnnnnnnnnnnnnnnnnnnnnnnnnnnnnnnnnnnnnnnnnnnnnnnnnnnnnnnnnnnnnnnnnnnnnnnnnnnnnnnnnnnnnnnnnnnnnnnnnnnnnnnnnnnnnnnnnnnnnnnnnnnnnnnnnnnnnnnnnnnnnnnnnnnnnnnnnnnnnnnnnnnnnnnnnnnnnnnnnnnnnnnnnnnnnnnnnnnnnnnnnnnnnnnnnnnnnnnnnnnnnnnnnnnnnnnnnnnnnnnnnnnnnnnnnnnnnnnnnnnnnnnnnnnnnnnnnnnnnnnnnnnnnnnnnnnnnnnnnnnnnnnnnnnnnnnnnnnnnnnnnnnnnnnnnnnnnnnnnnnnnnnnnnnnnnnnnnnnnnnnnnnnnnnnnnnnnnnnnnnnnnnnnnnnnnnnnnnnnnnnnnnnnnnnnnnnnnnnnnnnnnnnnnnnnnnnnnnnnnnnnnnnnnnnnnnnnnnnnnnnnnnnnnnnnnnnnnnnnnnnnnnnnnnnnnnnnnnnnnnnnnnnnnnnnnnnnnnnnnnnnnnnnnnnnnnnnnnnnnnnnnnnnnnnnnnnnnnnnnnnnnnnnnnnnnnnnnnnnnnnnnnnnnnnnnnnnnnnnnnnnnnnnnnnnnnnnnnnnnnnnnnnnnnnnnnnnnnnnnnnnnnnnnnnnnnnnnnnnnnnnnnnnnnnnnnnnnnnnnnnnnnnnnnnnnnnnnnnnnnnnnnnnnnnnnnnnnnnnnnnnnnnnnnnnnnnnnnnnnnnnnnnnnnnnnnnnnnnnnnnnnnnnnnnnnnnnnnnnnnnnnnnnnnnnnnnnnnnnnnnnnnnnnnnnnnnnnnnnnnnnnnnnnnnnnnnnnnnnnnnnnnnnnnnnnnnnnnnnnnnnnnnnnnnnnnnnnnnnnnnnnnnnnnnnnnnnnnnnnnnnnnnnnnnnnnnnnnnnnnnnnnnnnnnnnnnnnnnnnnnnnnnnnnnnnnnnnnnnnnnnnnnnnnnnnnnnnnnnnnnnnnnnnnnnnnnnnnnnnnnnnnnnnnnnnnnnnnnnnnnnnnnnnnnnnnnnnnnnnnnnnnnnnnnnnnnnnnnnnnnnnnnnnnnnnnnnnnnnnnnnnnnnnnnnnnnnnnnnnnnnnnnnnnnnnnnnnnnnnnnnnnnnnnnnnnnnnnnnnnnnnnnnnnnnnnnnnnnnnnnnnnnnnnnnnnnnnnnnnnnnnnnnnnnnnnnnnnnnnnnnnnnnnnnnnnnnnnnnnnnnnnnnnnnnnnnnnnnnnnnnnnnnnnnnnnnnnnnnnnnnnnnnnnnnnnnnnnnnnnnnnnnnnnnnnnnnnnnnnnnnnnnnnnnnnnnnnnnnnnnnnnnnnnnnnnnnnnnnnnnnnnnnnnnnnnnnnnnnnnnnnnnnnnnnnnnnnnnnnnnnnnnnnnnnnnnnnnnnnnnnnnnnnnnnnnnnnnnnnnnnnnnnnnnnnnnnnnnnnnnnnnnnnnnnnnnnnnnnnnnnnnnnnnnnnnnnnnnnnnnnnnnnnnnnnnnnnnnnnnnnnnnnnnnnnnnnnnnnnnnnnnnnnnnnnnnnnnnnnnnnnnnnnnnnnnnnnnnnnnnnnnnnnnnnnnnnnnnnnnnnnnnnnnnnnnnnnnnnnnnnnnnnnnnnnnnnnnnnnnnnnnnnnnnnnnnnnnnnnnnnnnnnnnnnnnnnnnnnnnnnnnnnnnnnnnnnnnnnnnnnnnnnnnnnnnnnnnnnnnnnnnnnnnnnnnnnnnnnnnnnnnnnnnnnnnnnnnnnnnnnnnnnnnnnnnnnnnnnnnnnnnnnnnnnnnnnnnnnnnnnnnnnnnnnnnnnnnnnnnnnnnnnnnnnnnnnnnnnnnnnnnnnnnnnnnnnnnnnnnnnnnnnnnnnnnnnnnnnnnnnnnnnnnnnnnnnnnnnnnnnnnnnnnnnnnnnnnnnnnnnnnnnnnnnnnnnnnnnnnnnnnnnnnnnnnnnnnnnnnnnnnnnnnnnnnnnnnnnnnnnnnnnnnnnnnnnnnnnnnnnnnnnnnnnnnnnnnnnnnnnnnnnnnnnnnnnnnnnnnnnnnnnnnnnnnnnnnnnnnnnnnnnnnnnnnnnnnnnnnnnnnnnnnnnnnnnnnnnnnnnnnnnnnnnnnnnnnnnnnnnnnnnnnnnnnnnnnnnnnnnnnnnnnnnnnnnnnnnnnnnnnnnnnnnnnnnnnnnnnnnnnnnnnnnnnnnnnnnnnnnnnnnnnnnnnnnnnnnnnnnnnnnnnnnnnnnnnnnnnnnnnnnnnnnnnnnnnnnnnnnnnnnnnnnnnnnnnnnnnnnnnnnnnnnnnnnnnnnnnnnnnnnnnnnnnnnnnnnnnnnnnnnnnnnnnnnnnnnnnnnnnnnnnnnnnnnnnnnnnnnnnnnnnnnnnnnnnnnnnnnnnnnnnnnnnnnnnnnnnnnnnnnnnnnnnnnnnnnnnnnnnnnnnnnnnnnnnnnnnnnnnnnnnnnnnnnnnnnnnnnnnnnnnnnnnnnnnnnnnnnnnnnnnnnnnnnnnnnnnnnnnnnnnnnnnnnnnnnnnnnnnnnnnnnnnnnnnnnnnnnnnnnnnnnnnnnnnnnnnnnnnnnnnnnnnnnnnnnnnnnnnnnnnnnnnnnnnnnnnnnnnnnnnnnnnnnnnnnnnnnnnnnnnnnnnnnnnnnnnnnnnnnnnnnnnnnnnnnnnnnnnnnnnnnnnnnnnnnnnnnnnnnnnnnnnnnnnnnnnnnnnnnnnnnnnnnnnnnnnnnnnnnnnnnnnnnnnnnnnnnnnnnnnnnnnnnnnnnnnnnnnnnnnnnnnnnnnnnnnnnnnnnnnnnnnnnnnnnnnnnnnnnnnnnnnnnnnnnnnnnnnnnnnnnnnnnnnnnnnnnnnnnnnnnnnnnnnnnnnnnnnnnnnnnnnnnnnnnnnnnnnnnnnnnnnnnnnnnnnnnnnnnnnnnnnnnnnnnnnnnnnnnnnnnnnnnnnnnnnnnnnnnnnnnnnnnnnnnnnnnnnnnnnnnnnnnnnnnnnnnnnnnnnnnnnnnnnnnnnnnnnnnnnnnnnnnnnnnnnnnnnnnnnnnnnnnnnnnnnnnnnnnnnnnnnnnnnnnnnnnnnnnnnnnnnnnnnnnnnnnnnnnnnnnnnnnnnnnnnnnnnnnnnnnnnnnnnnnnnnnnnnnnnnnnnnnnnnnnnnnnnnnnnnnnnnnnnnnnnnnnnnnnnnnnnnnnnnnnnnnnnnnnnnnnnnnnnnnnnnnnnnnnnnnnnnnnnnnnnnnnnnnnnnnnnnnnnnnnnnnnnnnnnnnnnnnnnnnnnnnnnnnnnnnnnnnnnnnnnnnnnnnnnnnnnnnnnnnnnnnnnnnnnnnnnnnnnnnnnnnnnnnnnnnnnnnnnnnnnnnnnnnnnnnnnnnnnnnnnnnnnnnnnnnnnnnnnnnnnnnnnnnnnnnnnnnnnnnnnnnnnnnnnnnnnnnnnnnnnnnnnnnnnnnnnnnnnnnnnnnnnnnnnnnnnnnnnnnnnnnnnnnnnnnnnnnnnnnnnnnnnnnnnnnnnnnnnnnnnnnnnnnnnnnnnnnnnnnnnnnnnnnnnnnnnnnnnnnnnnnnnnnnnnnnnnnnnnnnnnnnnnnnnnnnnnnnnnnnnnnnnnnnnnnnnnnnnnnnnnnnnnnnnnnnnnnnnnnnnnnnnnnnnnnnnnnnnnnnnnnnnnnnnnnnnnnnnnnnnnnnnnnnnnnnnnnnnnnnnnnnnnnnnnnnnnnnnnnnnnnnnnnnnnnnnnnnnnnnnnnnnnnnnnnnnnnnnnnnnnnnnnnnnnnnnnnnnnnnnnnnnnnnnnnnnnnnnnnnnnnnnnnnnnnnnnnnnnnnnnnnnnnnnnnnnnnnnnnnnnnnnnnnnnnnnnnnnnnnnnnnnnnnnnnnnnnnnnnnnnnnnnnnnnnnnnnnnnnnnnnnnnnnnnnnnnnnnnnnnnnnnnnnnnnnnnnnnnnnnnnnnnnnnnnnnnnnnnnnnnnnnnnnnnnnnnnnnnnnnnnnnnnnnnnnnnnnnnnnnnnnnnnnnnnnnnnnnnnnnnnnnnnnnnnnnnnnnnnnnnnnnnnnnnnnnnnnnnnnnnnnnnnnnnnnnnnnnnnnnnnnnnnnnnnnnnnnnnnnnnnnnnnnnnnnnnnnnnnnnnnnnnnnnnnnnnnnnnnnnnnnnnnnnnnnnnnnnnnnnnnnnnnnnnnnnnnnnnnnnnnnnnnnnnnnnnnnnnnnnnnnnnnnnnnnnnnnnnnnnnnnnnnnnnnnnnnnnnnnnnnnnnnnnnnnnnnnnnnnnnnnnnnnnnnnnnnnnnnnnnnnnnnnnnnnnnnnnnnnnnnnnnnnnnnnnnnnnnnnnnnnnnnnnnnnnnnnnnnnnnnnnnnnnnnnnnnnnnnnnnnnnnnnnnnnnnnnnnnnnnnnnnnnnnnnnnnnnnnnnnnnnnnnnnnnnnnnnnnnnnnnnnnnnnnnnnnnnnnnnnnnnnnnnnnnnnnnnnnnnnnnnnnnnnnnnnnnnnnnnnnnnnnnnnnnnnnnnnnnnnnnnnnnnnnnnnnnnnnnnnnnnnnnnnnnnnnnnnnnnnnnnnnnnnnnnnnnnnnnnnnnnnnnnnnnnnnnnnnnnnnnnnnnnnnnnnnnnnnnnnnnnnnnnnnnnnnnnnnnnnnnnnnnnnnnnnnnnnnnnnnnnnnnnnnnnnnnnnnnnnnnnnnnnnnnnnnnnnnnnnnnnnnnnnnnnnnnnnnnnnnnnnnnnnnnnnnnnnnnnnnnnnnnnnnnnnnnnnnnnnnnnnnnnnnnnnnnnnnnnnnnnnnnnnnnnnnnnnnnnnnnnnnnnnnnnnnnnnnnnnnnnnnnnnnnnnnnnnnnnnnnnnnnnnnnnnnnnnnnnnnnnnnnnnnnnnnnnnnnnnnnnnnnnnnnnnnnnnnnnnnnnnnnnnnnnnnnnnnnnnnnnnnnnnnnnnnnnnnnnnnnnnnnnnnnnnnnnnnnnnnnnnnnnnnnnnnnnnnnnnnnnnnnnnnnnnnnnnnnnnnnnnnnnnnnnnnnnnnnnnnnnnnnnnnnnnnnnnnnnnnnnnnnnnnnnnnnnnnnnnnnnnnnnnnnnnnnnnnnnnnnnnnnnnnnnnnnnnnnnnnnnnnnnnnnnnnnnnnnnnnnnnnnnnnnnnnnnnnnnnnnnnnnnnnnnnnnnnnnnnnnnnnnnnnnnnnnnnnnnnnnnnnnnnnnnnnnnnnnnnnnnnnnnnnnnnnnnnnnnnnnnnnnnnnnnnnnnnnnnnnnnnnnnnnnnnnnnnnnnnnnnnnnnnnnnnnnnnnnnnnnnnnnnnnnnnnnnnnnnnnnnnnnnnnnnnnnnnnnnnnnnnnnnnnnnnnnnnnnnnnnnnnnnnnnnnnnnnnnnnnnnnnnnnnnnnnnnnnnnnnnnnnnnnnnnnnnnnnnnnnnnnnnnnnnnnnnnnnnnnnnnnnnnnnnnnnnnnnnnnnnnnnnnnnnnnnnnnnnnnnnnnnnnnnnnnnnnnnnnnnnnnnnnnnnnnnnnnnnnnnnnnnnnnnnnnnnnnnnnnnnnnnnnnnnnnnnnnnnnnnnnnnnnnnnnnnnnnnnnnnnnnnnnnnnnnnnnnnnnnnnnnnnnnnnnnnnnnnnnnnnnnnnnnnnnnnnnnnnnnnnnnnnnnnnnnnnnnnnnnnnnnnnnnnnnnnnnnnnnnnnnnnnnnnnnnnnnnnnnnnnnnnnnnnnnnnnnnnnnnnnnnnnnnnnnnnnnnnnnnnnnnnnnnnnnnnnnnnnnnnnnnnnnnnnnnnnnnnnnnnnnnnnnnnnnnnnnnnnnnnnnnnnnnnnnnnnnnnnnnnnnnnnnnnnnnnnnnnnnnnnnnnnnnnnnnnnnnnnnnnnnnnnnnnnnnnnnnnnnnnnnnnnnnnnnnnnnnnnnnnnnnnnnnnnnnnnnnnnnnnnnnnnnnnnnnnnnnnnnnnnnnnnnnnnnnnnnnnnnnnnnnnnnnnnnnnnnnnnnnnnnnnnnnnnnnnnnnnnnnnnnnnnnnnnnnnnnnnnnnnnnnnnnnnnnnnnnnnnnnnnnnnnnnnnnnnnnnnnnnnnnnnnnnnnnnnnnnnnnnnnnnnnnnnnnnnnnnnnnnnnnnnnnnnnnnnnnnnnnnnnnnnnnnnnnnnnnnnnnnnnnnnnnnnnnnnnnnnnnnnnnnnnnnnnnnnnnnnnnnnnnnnnnnnnnnnnnnnnnnnnnnnnnnnnnnnnnnnnnnnnnnnnnnnnnnnnnnnnnnnnnnnnnnnnnnnnnnnnnnnnnnnnnnnnnnnnnnnnnnnnnnnnnnnnnnnnnnnnnnnnnnnnnnnnnnnnnnnnnnnnnnnnnnnnnnnnnnnnnnnnnnnnnnnnnnnnnnnnnnnnnnnnnnnnnnnnnnnnnnnnnnnnnnnnnnnnnnnnnnnnnnnnnnnnnnnnnnnnnnnnnnnnnnnnnnnnnnnnnnnnnnnnnnnnnnnnnnnnnnnnnnnnnnnnnnnnnnnnnnnnnnnnnnnnnnnnnnnnnnnnnnnnnnnnnnnnnnnnnnnnnnnnnnnnnnnnnnnnnnnnnnnnnnnnnnnnnnnnnnnnnnnnnnnnnnnnnnnnnnnnnnnnnnnnnnnnnnnnnnnnnnnnnnnnnnnnnnnnnnnnnnnnnnnnnnnnnnnnnnnnnnnnnnnnnnnnnnnnnnnnnnnnnnnnnnnnnnnnnnnnnnnnnnnnnnnnnnnnnnnnnnnnnnnnnnnnnnnnnnnnnnnnnnnnnnnnnnnnnnnnnnnnnnnnnnnnnnnnnnnnnnnnnnnnnnnnnnnnnnnnnnnnnnnnnnnnnnnnnnnnnnnnnnnnnnnnnnnnnnnnnnnnnnnnnnnnnnnnnnnnnnnnnnnnnnnnnnnnnnnnnnnnnnnnnnnnnnnnnnnnnnnnnnnnnnnnnnnnnnnnnnnnnnnnnnnnnnnnnnnnnnnnnnnnnnnnnnnnnnnnnnnnnnnnnnnnnnnnnnnnnnnnnnnnnnnnnnnnnnnnnnnnnnnnnnnnnnnnnnnnnnnnnnnnnnnnnnnnnnnnnnnnnnnnnnnnnnnnnnnnnnnnnnnnnnnnnnnnnnnnnnnnnnnnnnnnnnnnnnnnnnnnnnnnnnnnnnnnnnnnnnnnnnnnnnnnnnnnnnnnnnnnnnnnnnnnnnnnnnnnnnnnnnnnnnnnnnnnnnnnnnnnnnnnnnnnnnnnnnnnnnnnnnnnnnnnnnnnnnnnnnnnnnnnnnnnnnnnnnnnnnnnnnnnnnnnnnnnnnnnnnnnnnnnnnnnnnnnnnnnnnnnnnnnnnnnnnnnnnnnnnnnnnnnnnnnnnnnnnnnnnnnnnnnnnnnnnnnnnnnnnnnnnnnnnnnnnnnnnnnnnnnnnnnnnnnnnnnnnnnnnnnnnnnnnnnnnnnnnnnnnnnnnnnnnnnnnnnnnnnnnnnnnnnnnnnnnnnnnnnnnnnnnnnnnnnnnnnnnnnnnnnnnnnnnnnnnnnnnnnnnnnnnnnnnnnnnnnnnnnnnnnnnnnnnnnnnnnnnnnnnnnnnnnnnnnnnnnnnnnnnnnnnnnnnnnnnnnnnnnnnnnnnnnnnnnnnnnnnnnnnnnnnnnnnnnnnnnnnnnnnnnnnnnnnnnnnnnnnnnnnnnnnnnnnnnnnnnnnnnnnnnnnnnnnnnnnnnnnnnnnnnnnnnnnnnnnnnnnnnnnnnnnnnnnnnnnnnnnnnnnnnnnnnnnnnnnnnnnnnnnnnnnnnnnnnnnnnnnnnnnnnnnnnnnnnnnnnnnnnnnnnnnnnnnnnnnnnnnnnnnnnnnnnnnnnnnnnnnnnnnnnnnnnnnnnnnnnnnnnnnnnnnnnnnnnnnnnnnnnnnnnnnnnnnnnnnnnnnnnnnnnnnnnnnnnnnnnnnnnnnnnnnnnnnnnnnnnnnnnnnnnnnnnnnnnnnnnnnnnnnnnnnnnnnnnnnnnnnnnnnnnnnnnnnnnnnnnnnnnnnnnnnnnnnnnnnnnnnnnnnnnnnnnnnnnnnnnnnnnnnnnnnnnnnnnnnnnnnnnnnnnnnnnnnnnnnnnnnnnnnnnnnnnnnnnnnnnnnnnnnnnnnnnnnnnnnnnnnnnnnnnnnnnnnnnnnnnnnnnnnnnnnnnnnnnnnnnnnnnnnnnnnnnnnnnnnnnnnnnnnnnnnnnnnnnnnnnnnnnnnnnnnnnnnnnnnnnnnnnnnnnnnnnnnnnnnnnnnnnnnnnnnnnnnnnnnnnnnnnnnnnnnnnnnnnnnnnnnnnnnnnnnnnnnnnnnnnnnnnnnnnnnnnnnnnnnnnnnnnnnnnnnnnnnnnnnnnnnnnnnnnnnnnnnnnnnnnnnnnnnnnnnnnnnnnnnnnnnnnnnnnnnnnnnnnnnnnnnnnnnnnnnnnnnnnnnnnnnnnnnnnnnnnnnnnnnnnnnnnnnnnnnnnnnnnnnnnnnnnnnnnnnnnnnnnnnnnnnnnnnnnnnnnnnnnnnnnnnnnnnnnnnnnnnnnnnnnnnnnnnnnnnnnnnnnnnnnnnnnnnnnnnnnnnnnnnnnnnnnnnnnnnnnnnnnnnnnnnnnnnnnnnnnnnnnnnnnnnnnnnnnnnnnnnnnnnnnnnnnnnnnnnnnnnnnnnnnnnnnnnnnnnnnnnnnnnnnnnnnnnnnnnnnnnnnnnnnnnnnnnnnnnnnnnnnnnnnnnnnnnnnnnnnnnnnnnnnnnnnnnnnnnnnnnnnnnnnnnnnnnnnnnnnnnnnnnnnnnnnnnnnnnnnnnnnnnnnnnnnnnnnnnnnnnnnnnnnnnnnnnnnnnnnnnnnnnnnnnnnnnnnnnnnnnnnnnnnnnnnnnnnnnnnnnnnnnnnnnnnnnnnnnnnnnnnnnnnnnnnnnnnnnnnnnnnnnnnnnnnnnnnnnnnnnnnnnnnnnnnnnnnnnnnnnnnnnnnnnnnnnnnnnnnnnnnnnnnnnnnnnnnnnnnnnnnnnnnnnnnnnnnnnnnnnnnnnnnnnnnnnnnnnnnnnnnnnnnnnnnnnnnnnnnnnnnnnnnnnnnnnnnnnnnnnnnnnnnnnnnnnnnnnnnnnnnnnnnnnnnnnnnnnnnnnnnnnnnnnnnnnnnnnnnnnnnnnnnnnnnnnnnnnnnnnnnnnnnnnnnnnnnnnnnnnnnnnnnnnnnnnnnnnnnnnnnnnnnnnnnnnnnnnnnnnnnnnnnnnnnnnnnnnnnnnnnnnnnnnnnnnnnnnnnnnnnnnnnnnnnnnnnnnnnnnnnnnnnnnnnnnnnnnnnnnnnnnnnnnnnnnnnnnnnnnnnnnnnnnnnnnnnnnnnnnnnnnnnnnnnnnnnnnnnnnnnnnnnnnnnnnnnnnnnnnnnnnnnnnnnnnnnnnnnnnnnnnnnnnnnnnnnnnnnnnnnnnnnnnnnnnnnnnnnnnnnnnnnnnnnnnnnnnnnnnnnnnnnnnnnnnnnnnnnnnnnnnnnnnnnnnnnnnnnnnnnnnnnnnnnnnnnnnnnnnnnnnnnnnnnnnnnnnnnnnnnnnnnnnnnnnnnnnnnnnnnnnnnnnnnnnnnnnnnnnnnnnnnnnnnnnnnnnnnnnnnnnnnnnnnnnnnnnnnnnnnnnnnnnnnnnnnnnnnnnnnnnnnnnnnnnnnnnnnnnnnnnnnnnnnnnnnnnnnnnnnnnnnnnnnnnnnnnnnnnnnnnnnnnnnnnnnnnnnnnnnnnnnnnnnnnnnnnnnnnnnnnnnnnnnnnnnnnnnnnnnnnnnnnnnnnnnnnnnnnnnnnnnnnnnnnnnnnnnnnnnnnnnnnnnnnnnnnnnnnnnnnnnnnnnnnnnnnnnnnnnnnnnnnnnnnnnnnnnnnnnnnnnnnnnnnnnnnnnnnnnnnnnnnnnnnnnnnnnnnnnnnnnnnnnnnnnnnnnnnnnnnnnnnnnnnnnnnnnnnnnnnnnnnnnnnnnnnnnnnnnnnnnnnnnnnnnnnnnnnnnnnnnnnnnnnnnnnnnnnnnnnnnnnnnnnnnnnnnnnnnnnnnnnnnnnnnnnnnnnnnnnnnnnnnnnnnnnnnnnnnnnnnnnnnnnnnnnnnnnnnnnnnnnnnnnnnnnnnnnnnnnnnnnnnnnnnnnnnnnnnnnnnnnnnnnnnnnnnnnnnnnnnnnnnnnnnnnnnnnnnnnnnnnnnnnnnnnnnnnnnnnnnnnnnnnnnnnnnnnnnnnnnnnnnnnnnnnnnnnnnnnnnnnnnnnnnnnnnnnnnnnnnnnnnnnnnnnnnnnnnnnnnnnnnnnnnnnnnnnnnnnnnnnnnnnnnnnnnnnnnnnnnnnnnnnnnnnnnnnnnnnnnnnnnnnnnnnnnnnnnnnnnnnnnnnnnnnnnnnnnnnnnnnnnnnnnnnnnnnnnnnnnnnnnnnnnnnnnnnnnnnnnnnnnnnnnnnnnnnnnnnnnnnnnnnnnnnnnnnnnnnnnnnnnnnnnnnnnnnnnnnnnnnnnnnnnnnnnnnnnnnnnnnnnnnnnnnnnnnnnnnnnnnnnnnnnnnnnnnnnnnnnnnnnnnnnnnnnnnnnnnnnnnnnnnnnnnnnnnnnnnnnnnnnnnnnnnnnnnnnnnnnnnnnnnnnnnnnnnnnnnnnnnnnnnnnnnnnnnnnnnnnnnnnnnnnnnnnnnnnnnnnnnnnnnnnnnnnnnnnnnnnnnnnnnnnnnnnnnnnnnnnnnnnnnnnnnnnnnnnnnnnnnnnnnnnnnnnnnnnnnnnnnnnnnnnnnnnnnnnnnnnnnnnnnnnnnnnnnnnnnnnnnnnnnnnnnnnnnnnnnnnnnnnnnnnnnnnnnnnnnnnnnnnnnnnnnnnnnnnnnnnnnnnnnnnnnnnnnnnnnnnnnnnnnnnnnnnnnnnnnnnnnnnnnnnnnnnnnnnnnnnnnnnnnnnnnnnnnnnnnnnnnnnnnnnnnnnnnnnnnnnnnnnnnnnnnnnnnnnnnnnnnnnnnnnnnnnnnnnnnnnnnnnnnnnnnnnnnnnnnnnnnnnnnnnnnnnnnnnnnnnnnnnnnnnnnnnnnnnnnnnnnnnnnnnnnnnnnnnnnnnnnnnnnnnnnnnnnnnnnnnnnnnnnnnnnnnnnnnnnnnnnnnnnnnnnnnnnnnnnnnnnnnnnnnnnnnnnnnnnnnnnnnnnnnnnnnnnnnnnnnnnnnnnnnnnnnnnnnnnnnnnnnnnnnnnnnnnnnnnnnnnnnnnnnnnnnnnnnnnnnnnnnnnnnnnnnnnnnnnnnnnnnnnnnnnnnnnnnnnnnnnnnnnnnnnnnnnnnnnnnnnnnnnnnnnnnnnnnnnnnnnnnnnnnnnnnnnnnnnnnnnnnnnnnnnnnnnnnnnnnnnnnnnnnnnnnnnnnnnnnnnnnnnnnnnnnnnnnnnnnnnnnnnnnnnnnnnnnnnnnnnnnnnnnnnnnnnnnnnnnnnnnnnnnnnnnnnnnnnnnnnnnnnnnnnnnnnnnnnnnnnnnnnnnnnnnnnnnnnnnnnnnnnnnnnnnnnnnnnnnnnnnnnnnnnnnnnnnnnnnnnnnnnnnnnnnnnnnnnnnnnnnnnnnnnnnnnnnnnnnnnnnnnnnnnnnnnnnnnnnnnnnnnnnnnnnnnnnnnnnnnnnnnnnnnnnnnnnnnnnnnnnnnnnnnnnnnnnnnnnnnnnnnnnnnnnnnnnnnnnnnnnnnnnnnnnnnnnnnnnnnnnnnnnnnnnnnnnnnnnnnnnnnnnnnnnnnnnnnnnnnnnnnnnnnnnnnnnnnnnnnnnnnnnnnnnnnnnnnnnnnnnnnnnnnnnnnnnnnnnnnnnnnnnnnnnnnnnnnnnnnnnnnnnnnnnnnnnnnnnnnnnnnnnnnnnnnnnnnnnnnnnnnnnnnnnnnnnnnnnnnnnnnnnnnnnnnnnnnnnnnnnnnnnnnnnnnnnnnnnnnnnnnnnnnnnnnnnnnnnnnnnnnnnnnnnnnnnnnnnnnnnnnnnnnnnnnnnnnnnnnnnnnnnnnnnnnnnnnnnnnnnnnnnnnnnnnnnnnnnnnnnnnnnnnnnnnnnnnnnnnnnnnnnnnnnnnnnnnnnnnnnnnnnnnnnnnnnnnnnnnnnnnnnnnnnnnnnnnnnnnnnnnnnnnnnnnnnnnnnnnnnnnnnnnnnnnnnnnnnnnnnnnnnnnnnnnnnnnnnnnnnnnnnnnnnnnnnnnnnnnnnnnnnnnnnnnnnnnnnnnnnnnnnnnnnnnnnnnnnnnnnnnnnnnnnnnnnnnnnnnnnnnnnnnnnnnnnnnnnnnnnnnnnnnnnnnnnnnnnnnnnnnnnnnnnnnnnnnnnnnnnnnnnnnnnnnnnnnnnnnnnnnnnnnnnnnnnnnnnnnnnnnnnnnnnnnnnnnnnnnnnnnnnnnnnnnnnnnnnnnnnnnnnnnnnnnnnnnnnnnnnnnnnnnnnnnnnnnnnnnnnnnnnnnnnnnnnnnnnnnnnnnnnnnnnnnnnnnnnnnnnnnnnnnnnnnnnnnnnnnnnnnnnnnnnnnnnnnnnnnnnnnnnnnnnnnnnnnnnnnnnnnnnnnnnnnnnnnnnnnnnnnnnnnnnnnnnnnnnnnnnnnnnnnnnnnnnnnnnnnnnnnnnnnnnnnnnnnnnnnnnnnnnnnnnnnnnnnnnnnnnnnnnnnnnnnnnnnnnnnnnnnnnnnnnnnnnnnnnnnnnnnnnnnnnnnnnnnnnnnnnnnnnnnnnnnnnnnnnnnnnnnnnnnnnnnnnnnnnnnnnnnnnnnnnnnnnnnnnnnnnnnnnnnnnnnnnnnnnnnnnnnnnnnnnnnnnnnnnnnnnnnnnnnnnnnnnnnnnnnnnnnnnnnnnnnnnnnnnnnnnnnnnnnnnnnnnnnnnnnnnnnnnnnnnnnnnnnnnnnnnnnnnnnnnnnnnnnnnnnnnnnnnnnnnnnnnnnnnnnnnnnnnnnnnnnnnnnnnnnnnnnnnnnnnnnnnnnnnnnnnnnnnnnnnnnnnnnnnnnnnnnnnnnnnnnnnnnnnnnnnnnnnnnnnnnnnnnnnnnnnnnnnnnnnnnnnnnnnnnnnnnnnnnnnnnnnnnnnnnnnnnnnnnnnnnnnnnnnnnnnnnnnnnnnnnnnnnnnnnnnnnnnnnnnnnnnnnnnnnnnnnnnnnnnnnnnnnnnnnnnnnnnnnnnnnnnnnnnnnnnnnnnnnnnnnnnnnnnnnnnnnnnnnnnnnnnnnnnnnnnnnnnnnnnnnnnnnnnnnnnnnnnnnnnnnnnnnnnnnnnnnnnnnnnnnnnnnnnnnnnnnnnnnnnnnnnnnnnnnnnnnnnnnnnnnnnnnnnnnnnnnnnnnnnnnnnnnnnnnnnnnnnnnnnnnnnnnnnnnnnnnnnnnnnnnnnnnnnnnnnnnnnnnnnnnnnnnnnnnnnnnnnnnnnnnnnnnnnnnnnnnnnnnnnnnnnnnnnnnnnnnnnnnnnnnnnnnnnnnnnnnnnnnnnnnnnnnnnnnnnnnnnnnnnnnnnnnnnnnnnnnnnnnnnnnnnnnnnnnnnnnnnnnnnnnnnnnnnnnnnnnnnnnnnnnnnnnnnnnnnnnnnnnnnnnnnnnnnnnnnnnnnnnnnnnnnnnnnnnnnnnnnnnnnnnnnnnnnnnnnnnnnnnnnnnnnnnnnnnnnnnnnnnnnnnnnnnnnnnnnnnnnnnnnnnnnnnnnnnnnnnnnnnnnnnnnnnnnnnnnnnnnnnnnnnnnnnnnnnnnnnnnnnnnnnnnnnnnnnnnnnnnnnnnnnnnnnnnnnnnnnnnnnnnnnnnnnnnnnnnnnnnnnnnnnnnnnnnnnnnnnnnnnnnnnnnnnnnnnnnnnnnnnnnnnnnnnnnnnnnnnnnnnnnnnnnnnnnnnnnnnnnnnnnnnnnnnnnnnnnnnnnnnnnnnnnnnnnnnnnnnnnnnnnnnnnnnnnnnnnnnnnnnnnnnnnnnnnnnnnnnnnnnnnnnnnnnnnnnnnnnnnnnnnnnnnnnnnnnnnnnnnnnnnnnnnnnnnnnnnnnnnnnnnnnnnnnnnnnnnnnnnnnnnnnnnnnnnnnnnnnnnnnnnnnnnnnnnnnnnnnnnnnnnnnnnnnnnnnnnnnnnnnnnnnnnnnnnnnnnnnnnnnnnnnnnnnnnnnnnnnnnnnnnnnnnnnnnnnnnnnnnnnnnnnnnnnnnnnnnnnnnnnnnnnnnnnnnnnnnnnnnnnnnnnnnnnnnnnnnnnnnnnnnnnnnnnnnnnnnnnnnnnnnnnnnnnnnnnnnnnnnnnnnnnnnnnnnnnnnnnnnnnnnnnnnnnnnnnnnnnnnnnnnnnnnnnnnnnnnnnnnnnnnnnnnnnnnnnnnnnnnnnnnnnnnnnnnnnnnnnnnnnnnnnnnnnnnnnnnnnnnnnnnnnnnnnnnnnnnnnnnnnnnnnnnnnnnnnnnnnnnnnnnnnnnnnnnnnnnnnnnnnnnnnnnnnnnnnnnnnnnnnnnnnnnnnnnnnnnnnnnnnnnnnnnnnnnnnnnnnnnnnnnnnnnnnnnnnnnnnnnnnnnnnnnnnnnnnnnnnnnnnnnnnnnnnnnnnnnnnnnnnnnnnnnnnnnnnnnnnnnnnnnnnnnnnnnnnnnnnnnnnnnnnnnnnnnnnnnnnnnnnnnnnnnnnnnnnnnnnnnnnnnnnnnnnnnnnnnnnnnnnnnnnnnnnnnnnnnnnnnnnnnnnnnnnnnnnnnnnnnnnnnnnnnnnnnnnnnnnnnnnnnnnnnnnnnnnnnnnnnnnnnnnnnnnnnnnnnnnnnnnnnnnnnnnnnnnnnnnnnnnnnnnnnnnnnnnnnnnnnnnnnnnnnnnnnnnnnnnnnnnnnnnnnnnnnnnnnnnnnnnnnnnnnnnnnnnnnnnnnnnnnnnnnnnnnnnnnnnnnnnnnnnnnnnnnnnnnnnnnnnnnnnnnnnnnnnnnnnnnnnnnnnnnnnnnnnnnnnnnnnnnnnnnnnnnnnnnnnnnnnnnnnnnnnnnnnnnnnnnnnnnnnnnnnnnnnnnnnnnnnnnnnnnnnnnnnnnnnnnnnnnnnnnnnnnnnnnnnnnnnnnnnnnnnnnnnnnnnnnnnnnnnnnnnnnnnnnnnnnnnnnnnnnnnnnnnnnnnnnnnnnnnnnnnnnnnnnnnnnnnnnnnnnnnnnnnnnnnnnnnnnnnnnnnnnnnnnnnnnnnnnnnnnnnnnnnnnnnnnnnnnnnnnnnnnnnnnnnnnnnnnnnnnnnnnnnnnnnnnnnnnnnnnnnnnnnnnnnnnnnnnnnnnnnnnnnnnnnnnnnnnnnnnnnnnnnnnnnnnnnnnnnnnnnnnnnnnnnnnnnnnnnnnnnnnnnnnnnnnnnnnnnnnnnnnnnnnnnnnnnnnnnnnnnnnnnnnnnnnnnnnnnnnnnnnnnnnnnnnnnnnnnnnnnnnnnnnnnnnnnnnnnnnnnnnnnnnnnnnnnnnnnnnnnnnnnnnnnnnnnnnnnnnnnnnnnnnnnnnnnnnnnnnnnnnnnnnnnnnnnnnnnnnnnnnnnnnnnnnnnnnnnnnnnnnnnnnnnnnnnnnnnnnnnnnnnnnnnnnnnnnnnnnnnnnnnnnnnnnnnnnnnnnnnnnnnnnnnnnnnnnnnnnnnnnnnnnnnnnnnnnnnnnnnnnnnnnnnnnnnnnnnnnnnnnnnnnnnnnnnnnnnnnnnnnnnnnnnnnnnnnnnnnnnnnnnnnnnnnnnnnnnnnnnnnnnnnnnnnnnnnnnnnnnnnnnnnnnnnnnnnnnnnnnnnnnnnnnnnnnnnnnnnnnnnnnnnnnnnnnnnnnnnnnnnnnnnnnnnnnnnnnnnnnnnnnnnnnnnnnnnnnnnnnnnnnnnnnnnnnnnnnnnnnnnnnnnnnnnnnnnnnnnnnnnnnnnnnnnnnnnnnnnnnnnnnnnnnnnnnnnnnnnnnnnnnnnnnnnnnnnnnnnnnnnnnnnnnnnnnnnnnnnnnnnnnnnnnnnnnnnnnnnnnnnnnnnnnnnnnnnnnnnnnnnnnnnnnnnnnnnnnnnnnnnnnnnnnnnnnnnnnnnnnnnnnnnnnnnnnnnnnnnnnnnnnnnnnnnnnnnnnnnnnnnnnnnnnnnnnnnnnnnnnnnnnnnnnnnnnnnnnnnnnnnnnnnnnnnnnnnnnnnnnnnnnnnnnnnnnnnnnnnnnnnnnnnnnnnnnnnnnnnnnnnnnnnnnnnnnnnnnnnnnnnnnnnnnnnnnnnnnnnnnnnnnnnnnnnnnnnnnnnnnnnnnnnnnnnnnnnnnnnnnnnnnnnnnnnnnnnnnnnnnnnnnnnnnnnnnnnnnnnnnnnnnnnnnnnnnnnnnnnnnnnnnnnnnnnnnnnnnnnnnnnnnnnnnnnnnnnnnnnnnnnnnnnnnnnnnnnnnnnnnnnnnnnnnnnnnnnnnnnnnnnnnnnnnnnnnnnnnnnnnnnnnnnnnnnnnnnnnnnnnnnnnnnnnnnnnnnnnnnnnnnnnnnnnnnnnnnnnnnnnnnnnnnnnnnnnnnnnnnnnnnnnnnnnnnnnnnnnnnnnnnnnnnnnnnnnnnnnnnnnnnnnnnnnnnnnnnnnnnnnnnnnnnnnnnnnnnnnnnnnnnnnnnnnnnnnnnnnnnnnnnnnnnnnnnnnnnnnnnnnnnnnnnnnnnnnnnnnnnnnnnnnnnnnnnnnnnnnnnnnnnnnnnnnnnnnnnnnnnnnnnnnnnnnnnnnnnnnnnnnnnnnnnnnnnnnnnnnnnnnnnnnnnnnnnnnnnnnnnnnnnnnnnnnnnnnnnnnnnnnnnnnnnnnnnnnnnnnnnnnnnnnnnnnnnnnnnnnnnnnnnnnnnnnnnnnnnnnnnnnnnnnnnnnnnnnnnnnnnnnnnnnnnnnnnnnnnnnnnnnnnnnnnnnnnnnnnnnnnnnnnnnnnnnnnnnnnnnnnnnnnnnnnnnnnnnnnnnnnnnnnnnnnnnnnnnnnnnnnnnnnnnnnnnnnnnnnnnnnnnnnnnnnnnnnnnnnnnnnnnnnnnnnnnnnnnnnnnnnnnnnnnnnnnnnnnnnnnnnnnnnnnnnnnnnnnnnnnnnnnnnnnnnnnnnnnnnnnnnnnnnnnnnnnnnnnnnnnnnnnnnnnnnnnnnnnnnnnnnnnnnnnnnnnnnnnnnnnnnnnnnnnnnnnnnnnnnnnnnnnnnnnnnnnnnnnnnnnnnnnnnnnnnnnnnnnnnnnnnnnnnnnnnnnnnnnnnnnnnnnnnnnnnnnnnnnnnnnnnnnnnnnnnnnnnnnnnnnnnnnnnnnnnnnnnnnnnnnnnnnnnnnnnnnnnnnnnnnnnnnnnnnnnnnnnnnnnnnnnnnnnnnnnnnnnnnnnnnnnnnnnnnnnnnnnnnnnnnnnnnnnnnnnnnnnnnnnnnnnnnnnnnnnnnnnnnnnnnnnnnnnnnnnnnnnnnnnnnnnnnnnnnnnnnnnnnnnnnnnnnnnnnnnnnnnnnnnnnnnnnnnnnnnnnnnnnnnnnnnnnnnnnnnnnnnnnnnnnnnnnnnnnnnnnnnnnnnnnnnnnnnnnnnnnnnnnnnnnnnnnnnnnnnnnnnnnnnnnnnnnnnnnnnnnnnnnnnnnnnnnnnnnnnnnnnnnnnnnnnnnnnnnnnnnnnnnnnnnnnnnnnnnnnnnnnnnnnnnnnnnnnnnnnnnnnnnnnnnnnnnnnnnnnnnnnnnnnnnnnnnnnnnnnnnnnnnnnnnnnnnnnnnnnnnnnnnnnnnnnnnnnnnnnnnnnnnnnnnnnnnnnnnnnnnnnnnnnnnnnnnnnnnnnnnnnnnnnnnnnnnnnnnnnnnnnnnnnnnnnnnnnnnnnnnnnnnnnnnnnnnnnnnnnnnnnnnnnnnnnnnnnnnnnnnnnnnnnnnnnnnnnnnnnnnnnnnnnnnnnnnnnnnnnnnnnnnnnnnnnnnnnnnnnnnnnnnnnnnnnnnnnnnnnnnnnnnnnnnnnnnnnnnnnnnnnnnnnnnnnnnnnnnnnnnnnnnnnnnnnnnnnnnnnnnnnnnnnnnnnnnnnnnnnnnnnnnnnnnnnnnnnnnnnnnnnnnnnnnnnnnnnnnnnnnnnnnnnnnnnnnnnnnnnnnnnnnnnnnnnnnnnnnnnnnnnnnnnnnnnnnnnnnnnnnnnnnnnnnnnnnnnnnnnnnnnnnnnnnnnnnnnnnnnnnnnnnnnnnnnnnnnnnnnnnnnnnnnnnnnnnnnnnnnnnnnnnnnnnnnnnnnnnnnnnnnnnnnnnnnnnnnnnnnnnnnnnnnnnnnnnnnnnnnnnnnnnnnnnnnnnnnnnnnnnnnnnnnnnnnnnnnnnnnnnnnnnnnnnnnnnnnnnnnnnnnnnnnnnnnnnnnnnnnnnnnnnnnnnnnnnnnnnnnnnnnnnnnnnnnnnnnnnnnnnnnnnnnnnnnnnnnnnnnnnnnnnnnnnnnnnnnnnnnnnnnnnnnnnnnnnnnnnnnnnnnnnnnnnnnnnnnnnnnnnnnnnnnnnnnnnnnnnnnnnnnnnnnnnnnnnnnnnnnnnnnnnnnnnnnnnnnnnnnnnnnnnnnnnnnnnnnnnnnnnnnnnnnnnnnnnnnnnnnnnnnnnnnnnnnnnnnnnnnnnnnnnnnnnnnnnnnnnnnnnnnnnnnnnnnnnnnnnnnnnnnnnnnnnnnnnnnnnnnnnnnnnnnnnnnnnnnnnnnnnnnnnnnnnnnnnnnnnnnnnnnnnnnnnnnnnnnnnnnnnnnnnnnnnnnnnnnnnnnnnnnnnnnnnnnnnnnnnnnnnnnnnnnnnnnnnnnnnnnnnnnnnnnnnnnnnnnnnnnnnnnnnnnnnnnnnnnnnnnnnnnnnnnnnnnnnnnnnnnnnnnnnnnnnnnnnnnnnnnnnnnnnnnnnnnnnnnnnnnnnnnnnnnnnnnnnnnnnnnnnnnnnnnnnnnnnnnnnnnnnnnnnnnnnnnnnnnnnnnnnnnnnnnnnnnnnnnnnnnnnnnnnnnnnnnnnnnnnnnnnnnnnnnnnnnnnnnnnnnnnnnnnnnnnnnnnnnnnnnnnnnnnnnnnnnnnnnnnnnnnnnnnnnnnnnnnnnnnnnnnnnnnnnnnnnnnnnnnnnnnnnnnnnnnnnnnnnnnnnnnnnnnnnnnnnnnnnnnnnnnnnnnnnnnnnnnnnnnnnnnnnnnnnnnnnnnnnnnnnnnnnnnnnnnnnnnnnnnnnnnnnnnnnnnnnnnnnnnnnnnnnnnnnnnnnnnnnnnnnnnnnnnnnnnnnnnnnnnnnnnnnnnnnnnnnnnnnnnnnnnnnnnnnnnnnnnnnnnnnnnnnnnnnnnnnnnnnnnnnnnnnnnnnnnnnnnnnnnnnnnnnnnnnnnnnnnnnnnnnnnnnnnnnnnnnnnnnnnnnnnnnnnnnnnnnnnnnnnnnnnnnnnnnnnnnnnnnnnnnnnnnnnnnnnnnnnnnnnnnnnnnnnnnnnnnnnnnnnnnnnnnnnnnnnnnnnnnnnnnnnnnnnnnnnnnnnnnnnnnnnnnnnnnnnnnnnnnnnnnnnnnnnnnnnnnnnnnnnnnnnnnnnnnnnnnnnnnnnnnnnnnnnnnnnnnnnnnnnnnnnnnnnnnnnnnnnnnnnnnnnnnnnnnnnnnnnnnnnnnnnnnnnnnnnnnnnnnnnnnnnnnnnnnnnnnnnnnnnnnnnnnnnnnnnnnnnnnnnnnnnnnnnnnnnnnnnnnnnnnnnnnnnnnnnnnnnnnnnnnnnnnnnnnnnnnnnnnnnnnnnnnnnnnnnnnnnnnnnnnnnnnnnnnnnnnnnnnnnnnnnnnnnnnnnnnnnnnnnnnnnnnnnnnnnnnnnnnnnnnnnnnnnnnnnnnnnnnnnnnnnnnnnnnnnnnnnnnnnnnnnnnnnnnnnnnnnnnnnnnnnnnnnnnnnnnnnnnnnnnnnnnnnnnnnnnnnnnnnnnnnnnnnnnnnnnnnnnnnnnnnnnnnnnnnnnnnnnnnnnnnnnnnnnnnnnnnnnnnnnnnnnnnnnnnnnnnnnnnnnnnnnnnnnnnnnnnnnnnnnnnnnnnnnnnnnnnnnnnnnnnnnnnnnnnnnnnnnnnnnnnnnnnnnnnnnnnnnnnnnnnnnnnnnnnnnnnnnnnnnnnnnnnnnnnnnnnnnnnnnnnnnnnnnnnnnnnnnnnnnnnnnnnnnnnnnnnnnnnnnnnnnnnnnnnnnnnnnnnnnnnnnnnnnnnnnnnnnnnnnnnnnnnnnnnnnnnnnnnnnnnnnnnnnnnnnnnnnnnnnnnnnnnnnnnnnnnnnnnnnnnnnnnnnnnnnnnnnnnnnnnnnnnnnnnnnnnnnnnnnnnnnnnnnnnnnnnnnnnnnnnnnnnnnnnnnnnnnnnnnnnnnnnnnnnnnnnnnnnnnnnnnnnnnnnnnnnnnnnnnnnnnnnnnnnnnnnnnnnnnnnnnnnnnnnnnnnnnnnnnnnnnnnnnnnnnnnnnnnnnnnnnnnnnnnnnnnnnnnnnnnnnnnnnnnnnnnnnnnnnnnnnnnnnnnnnnnnnnnnnnnnnnnnnnnnnnnnnnnnnnnnnnnnnnnnnnnnnnnnnnnnnnnnnnnnnnnnnnnnnnnnnnnnnnnnnnnnnnnnnnnnnnnnnnnnnnnnnnnnnnnnnnnnnnnnnnnnnnnnnnnnnnnnnnnnnnnnnnnnnnnnnnnnnnnnnnnnnnnnnnnnnnnnnnnnnnnnnnnnnnnnnnnnnnnnnnnnnnnnnnnnnnnnnnnnnnnnnnnnnnnnnnnnnnnnnnnnnnnnnnnnnnnnnnnnnnnnnnnnnnnnnnnnnnnnnnnnnnnnnnnnnnnnnnnnnnnnnnnnnnnnnnnnnnnnnnnnnnnnnnnnnnnnnnnnnnnnnnnnnnnnnnnnnnnnnnnnnnnnnnnnnnnnnnnnnnnnnnnnnnnnnnnnnnnnnnnnnnnnnnnnnnnnnnnnnnnnnnnnnnnnnnnnnnnnnnnnnnnnnnnnnnnnnnnnnnnnnnnnnnnnnnnnnnnnnnnnnnnnnnnnnnnnnnnnnnnnnnnnnnnnnnnnnnnnnnnnnnnnnnnnnnnnnnnnnnnnnnnnnnnnnnnnnnnnnnnnnnnnnnnnnnnnnnnnnnnnnnnnnnnnnnnnnnnnnnnnnnnnnnnnnnnnnnnnnnnnnnnnnnnnnnnnnnnnnnnnnnnnnnnnnnnnnnnnnnnnnnnnnnnnnnnnnnnnnnnnnnnnnnnnnnnnnnnnnnnnnnnnnnnnnnnnnnnnnnnnnnnnnnnnnnnnnnnnnnnnnnnnnnnnnnnnnnnnnnnnnnnnnnnnnnnnnnnnnnnnnnnnnnnnnnnnnnnnnnnnnnnnnnnnnnnnnnnnnnnnnnnnnnnnnnnnnnnnnnnnnnnnnnnnnnnnnnnnnnnnnnnnnnnnnnnnnnnnnnnnnnnnnnnnnnnnnnnnnnnnnnnnnnnnnnnnnnnnnnnnnnnnnnnnnnnnnnnnnnnnnnnnnnnnnnnnnnnnnnnnnnnnnnnnnnnnnnnnnnnnnnnnnnnnnnnnnnnnnnnnnnnnnnnnnnnnnnnnnnnnnnnnnnnnnnnnnnnnnnnnnnnnnnnnnnnnnnnnnnnnnnnnnnnnnnnnnnnnnnnnnnnnnnnnnnnnnnnnnnnnnnnnnnnnnnnnnnnnnnnnnnnnnnnnnnnnnnnnnnnnnnnnnnnnnnnnnnnnnnnnnnnnnnnnnnnnnnnnnnnnnnnnnnnnnnnnnnnnnnnnnnnnnnnnnnnnnnnnnnnnnnnnnnnnnnnnnnnnnnnnnnnnnnnnnnnnnnnnnnnnnnnnnnnnnnnnnnnnnnnnnnnnnnnnnnnnnnnnnnnnnnnnnnnnnnnnnnnnnnnnnnnnnnnnnnnnnnnnnnnnnnnnnnnnnnnnnnnnnnnnnnnnnnnnnnnnnnnnnnnnnnnnnnnnnnnnnnnnnnnnnnnnnnnnnnnnnnnnnnnnnnnnnnnnnnnnnnnnnnnnnnnnnnnnnnnnnnnnnnnnnnnnnnnnnnnnnnnnnnnnnnnnnnnnnnnnnnnnnnnnnnnnnnnnnnnnnnnnnnnnnnnnnnnnnnnnnnnnnnnnnnnnnnnnnnnnnnnnnnnnnnnnnnnnnnnnnnnnnnnnnnnnnnnnnnnnnnnnnnnnnnnnnnnnnnnnnnnnnnnnnnnnnnnnnnnnnnnnnnnnnnnnnnnnnnnnnnnnnnnnnnnnnnnnnnnnnnnnnnnnnnnnnnnnnnnnnnnnnnnnnnnnnnnnnnnnnnnnnnnnnnnnnnnnnnnnnnnnnnnnnnnnnnnnnnnnnnnnnnnnnnnnnnnnnnnnnnnnnnnnnnnnnnnnnnnnnnnnnnnnnnnnnnnnnnnnnnnnnnnnnnnnnnnnnnnnnnnnnnnnnnnnnnnnnnnnnnnnnnnnnnnnnnnnnnnnnnnnnnnnnnnnnnnnnnnnnnnnnnnnnnnnnnnnnnnnnnnnnnnnnnnnnnnnnnnnnnnnnnnnnnnnnnnnnnnnnnnnnnnnnnnnnnnnnnnnnnnnnnnnnnnnnnnnnnnnnnnnnnnnnnnnnnnnnnnnnnnnnnnnnnnnnnnnnnnnnnnnnnnnnnnnnnnnnnnnnnnnnnnnnnnnnnnnnnnnnnnnnnnnnnnnnnnnnnnnnnnnnnnnnnnnnnnnnnnnnnnnnnnnnnnnnnnnnnnnnnnnnnnnnnnnnnnnnnnnnnnnnnnnnnnnnnnnnnnnnnnnnnnnnnnnnnnnnnnnnnnnnnnnnnnnnnnnnnnnnnnnnnnnnnnnnnnnnnnnnnnnnnnnnnnnnnnnnnnnnnnnnnnnnnnnnnnnnnnnnnnnnnnnnnnnnnnnnnnnnnnnnnnnnnnnnnnnnnnnnnnnnnnnnnnnnnnnnnnnnnnnnnnnnnnnnnnnnnnnnnnnnnnnnnnnnnnnnnnnnnnnnnnnnnnnnnnnnnnnnnnnnnnnnnnnnnnnnnnnnnnnnnnnnnnnnnnnnnnnnnnnnnnnnnnnnnnnnnnnnnnnnnnnnnnnnnnnnnnnnnnnnnnnnnnnnnnnnnnnnnnnnnnnnnnnnnnnnnnnnnnnnnnnnnnnnnnnnnnnnnnnnnnnnnnnnnnnnnnnnnnnnnnnnnnnnnnnnnnnnnnnnnnnnnnnnnnnnnnnnnnnnnnnnnnnnnnnnnnnnnnnnnnnnnnnnnnnnnnnnnnnnnnnnnnnnnnnnnnnnnnnnnnnnnnnnnnnnnnnnnnnnnnnnnnnnnnnnnnnnnnnnnnnnnnnnnnnnnnnnnnnnnnnnnnnnnnnnnnnnnnnnnnnnnnnnnnnnnnnnnnnnnnnnnnnnnnnnnnnnnnnnnnnnnnnnnnnnnnnnnnnnnnnnnnnnnnnnnnnnnnnnnnnnnnnnnnnnnnnnnnnnnnnnnnnnnnnnnnnnnnnnnnnnnnnnnnnnnnnnnnnnnnnnnnnnnnnnnnnnnnnnnnnnnnnnnnnnnnnnnnnnnnnnnnnnnnnnnnnnnnnnnnnnnnnnnnnnnnnnnnnnnnnnnnnnnnnnnnnnnnnnnnnnnnnnnnnnnnnnnnnnnnnnnnnnnnnnnnnnnnnnnnnnnnnnnnnnnnnnnnnnnnnnnnnnnnnnnnnnnnnnnnnnnnnnnnnnnnnnnnnnnnnnnnnnnnnnnnnnnnnnnnnnnnnnnnnnnnnnnnnnnnnnnnnnnnnnnnnnnnnnnnnnnnnnnnnnnnnnnnnnnnnnnnnnnnnnnnnnnnnnnnnnnnnnnnnnnnnnnnnnnnnnnnnnnnnnnnnnnnnnnnnnnnnnnnnnnnnnnnnnnnnnnnnnnnnnnnnnnnnnnnnnnnnnnnnnnnnnnnnnnnnnnnnnnnnnnnnnnnnnnnnnnnnnnnnnnnnnnnnnnnnnnnnnnnnnnnnnnnnnnnnnnnnnnnnnnnnnnnnnnnnnnnnnnnnnnnnnnnnnnnnnnnnnnnnnnnnnnnnnnnnnnnnnnnnnnnnnnnnnnnnnnnnnnnnnnnnnnnnnnnnnnnnnnnnnnnnnnnnnnnnnnnnnnnnnnnnnnnnnnnnnnnnnnnnnnnnnnnnnnnnnnnnnnnnnnnnnnnnnnnnnnnnnnnnnnnnnnnnnnnnnnnnnnnnnnnnnnnnnnnnnnnnnnnnnnnnnnnnnnnnnnnnnnnnnnnnnnnnnnnnnnnnnnnnnnnnnnnnnnnnnnnnnnnnnnnnnnnnnnnnnnnnnnnnnnnnnnnnnnnnnnnnnnnnnnnnnnnnnnnnnnnnnnnnnnnnnnnnnnnnnnnnnnnnnnnnnnnnnnnnnnnnnnnnnnnnnnnnnnnnnnnnnnnnnnnnnnnnnnnnnnnnnnnnnnnnnnnnnnnnnnnnnnnnnnnnnnnnnnnnnnnnnnnnnnnnnnnnnnnnnnnnnnnnnnnnnnnnnnnnnnnnnnnnnnnnnnnnnnnnnnnnnnnnnnnnnnnnnnnnnnnnnnnnnnnnnnnnnnnnnnnnnnnnnnnnnnnnnnnnnnnnnnnnnnnnnnnnnnnnnnnnnnnnnnnnnnnnnnnnnnnnnnnnnnnnnnnnnnnnnnnnnnnnnnnnnnnnnnnnnnnnnnnnnnnnnnnnnnnnnnnnnnnnnnnnnnnnnnnnnnnnnnnnnnnnnnnnnnnnnnnnnnnnnnnnnnnnnnnnnnnnnnnnnnnnnnnnnnnnnnnnnnnnnnnnnnnnnnnnnnnnnnnnnnnnnnnnnnnnnnnnnnnnnnnnnnnnnnnnnnnnnnnnnnnnnnnnnnnnnnnnnnnnnnnnnnnnnnnnnnnnnnnnnnnnnnnnnnnnnnnnnnnnnnnnnnnnnnnnnnnnnnnnnnnnnnnnnnnnnnnnnnnnnnnnnnnnnnnnnnnnnnnnnnnnnnnnnnnnnnnnnnnnnnnnnnnnnnnnnnnnnnnnnnnnnnnnnnnnnnnnnnnnnnnnnnnnnnnnnnnnnnnnnnnnnnnnnnnnnnnnnnnnnnnnnnnnnnnnnnnnnnnnnnnnnnnnnnnnnnnnnnnnnnnnnnnnnnnnnnnnnnnnnnnnnnnnnnnnnnnnnnnnnnnnnnnnnnnnnnnnnnnnnnnnnnnnnnnnnnnnnnnnnnnnnnnnnnnnnnnnnnnnnnnnnnnnnnnnnnnnnnnnnnnnnnnnnnnnnnnnnnnnnnnnnnnnnnnnnnnnnnnnnnnnnnnnnnnnnnnnnnnnnnnnnnnnnnnnnnnnnnnnnnnnnnnnnnnnnnnnnnnnnnnnnnnnnnnnnnnnnnnnnnnnnnnnnnnnnnnnnnnnnnnnnnnnnnnnnnnnnnnnnnnnnnnnnnnnnnnnnnnnnnnnnnnnnnnnnnnnnnnnnnnnnnnnnnnnnnnnnnnnnnnnnnnnnnnnnnnnnnnnnnnnnnnnnnnnnnnnnnnnnnnnnnnnnnnnnnnnnnnnnnnnnnnnnnnnnnnnnnnnnnnnnnnnnnnnnnnnnnnnnnnnnnnnnnnnnnnnnnnnnnnnnnnnnnnnnnnnnnnnnnnnnnnnnnnnnnnnnnnnnnnnnnnnnnnnnnnnnnnnnnnnnnnnnnnnnnnnnnnnnnnnnnnnnnnnnnnnnnnnnnnnnnnnnnnnnnnnnnnnnnnnnnnnnnnnnnnnnnnnnnnnnnnnnnnnnnnnnnnnnnnnnnnnnnnnnnnnnnnnnnnnnnnnnnnnnnnnnnnnnnnnnnnnnnnnnnnnnnnnnnnnnnnnnnnnnnnnnnnnnnnnnnnnnnnnnnnnnnnnnnnnnnnnnnnnnnnnnnnnnnnnnnnnnnnnnnnnnnnnnnnnnnnnnnnnnnnnnnnnnnnnnnnnnnnnnnnnnnnnnnnnnnnnnnnnnnnnnnnnnnnnnnnnnnnnnnnnnnnnnnnnnnnnnnnnnnnnnnnnnnnnnnnnnnnnnnnnnnnnnnnnnnnnnnnnnnnnnnnnnnnnnnnnnnnnnnnnnnnnnnnnnnnnnnnnnnnnnnnnnnnnnnnnnnnnnnnnnnnnnnnnnnnnnnnnnnnnnnnnnnnnnnnnnnnnnnnnnnnnnnnnnnnnnnnnnnnnnnnnnnnnnnnnnnnnnnnnnnnnnnnnnnnnnnnnnnnnnnnnnnnnnnnnnnnnnnnnnnnnnnnnnnnnnnnnnnnnnnnnnnnnnnnnnnnnnnnnnnnnnnnnnnnnnnnnnnnnnnnnnnnnnnnnnnnnnnnnnnnnnnnnnnnnnnnnnnnnnnnnnnnnnnnnnnnnnnnnnnnnnnnnnnnnnnnnnnnnnnnnnnnnnnnnnnnnnnnnnnnnnnnnnnnnnnnnnnnnnnnnnnnnnnnnnnnnnnnnnnnnnnnnnnnnnnnnnnnnnnnnnnnnnnnnnnnnnnnnnnnnnnnnnnnnnnnnnnnnnnnnnnnnnnnnnnnnnnnnnnnnnnnnnnnnnnnnnnnnnnnnnnnnnnnnnnnnnnnnnnnnnnnnnnnnnnnnnnnnnnnnnnnnnnnnnnnnnnnnnnnnnnnnnnnnnnnnnnnnnnnnnnnnnnnnnnnnnnnnnnnnnnnnnnnnnnnnnnnnnnnnnnnnnnnnnnnnnnnnnnnnnnnnnnnnnnnnnnnnnnnnnnnnnnnnnnnnnnnnnnnnnnnnnnnnnnnnnnnnnnnnnnnnnnnnnnnnnnnnnnnnnnnnnnnnnnnnnnnnnnnnnnnnnnnnnnnnnnnnnnnnnnnnnnnnnnnnnnnnnnnnnnnnnnnnnnnnnnnnnnnnnnnnnnnnnnnnnnnnnnnnnnnnnnnnnnnnnnnnnnnnnnnnnnnnnnnnnnnnnnnnnnnnnnnnnnnnnnnnnnnnnnnnnnnnnnnnnnnnnnnnnnnnnnnnnnnnnnnnnnnnnnnnnnnnnnnnnnnnnnnnnnnnnnnnnnnnnnnnnnnnnnnnnnnnnnnnnnnnnnnnnnnnnnnnnnnnnnnnnnnnnnnnnnnnnnnnnnnnnnnnnnnnnnnnnnnnnnnnnnnnnnnnnnnnnnnnnnnnnnnnnnnnnnnnnnnnnnnnnnnnnnnnnnnnnnnnnnnnnnnnnnnnnnnnnnnnnnnnnnnnnnnnnnnnnnnnnnnnnnnnnnnnnnnnnnnnnnnnnnnnnnnnnnnnnnnnnnnnnnnnnnnnnnnnnnnnnnnnnnnnnnnnnnnnnnnnnnnnnnnnnnnnnnnnnnnnnnnnnnnnnnnnnnnnnnnnnnnnnnnnnnnnnnnnnnnnnnnnnnnnnnnnnnnnnnnnnnnnnnnnnnnnnnnnnnnnnnnnnnnnnnnnnnnnnnnnnnnnnnnnnnnnnnnnnnnnnnnnnnnnnnnnnnnnnnnnnnnnnnnnnnnnnnnnnnnnnnnnnnnnnnnnnnnnnnnnnnnnnnnnnnnnnnnnnnnnnnnnnnnnnnnnnnnnnnnnnnnnnnnnnnnnnnnnnnnnnnnnnnnnnnnnnnnnnnnnnnnnnnnnnnnnnnnnnnnnnnnnnnnnnnnnnnnnnnnnnnnnnnnnnnnnnnnnnnnnnnnnnnnnnnnnnnnnnnnnnnnnnnnnnnnnnnnnnnnnnnnnnnnnnnnnnnnnnnnnnnnnnnnnnnnnnnnnnnnnnnnnnnnnnnnnnnnnnnnnnnnnnnnnnnnnnnnnnnnnnnnnnnnnnnnnnnnnnnnnnnnnnnnnnnnnnnnnnnnnnnnnnnnnnnnnnnnnnnnnnnnnnnnnnnnnnnnnnnnnnnnnnnnnnnnnnnnnnnnnnnnnnnnnnnnnnnnnnnnnnnnnnnnnnnnnnnnnnnnnnnnnnnnnnnnnnnnnnnnnnnnnnnnnnnnnnnnnnnnnnnnnnnnnnnnnnnnnnnnnnnnnnnnnnnnnnnnnnnnnnnnnnnnnnnnnnnnnnnnnnnnnnnnnnnnnnnnnnnnnnnnnnnnnnnnnnnnnnnnnnnnnnnnnnnnnnnnnnnnnnnnnnnnnnnnnnnnnnnnnnnnnnnnnnnnnnnnnnnnnnnnnnnnnnnnnnnnnnnnnnnnnnnnnnnnnnnnnnnnnnnnnnnnnnnnnnnnnnnnnnnnnnnnnnnnnnnnnnnnnnnnnnnnnnnnnnnnnnnnnnnnnnnnnnnnnnnnnnnnnnnnnnnnnnnnnnnnnnnnnnnnnnnnnnnnnnnnnnnnnnnnnnnnnnnnnnnnnnnnnnnnnnnnnnnnnnnnnnnnnnnnnnnnnnnnnnnnnnnnnnnnnnnnnnnnnnnnnnnnnnnnnnnnnnnnnnnnnnnnnnnnnnnnnnnnnnnnnnnnnnnnnnnnnnnnnnnnnnnnnnnnnnnnnnnnnnnnnnnnnnnnnnnnnnnnnnnnnnnnnnnnnnnnnnnnnnnnnnnnnnnnnnnnnnnnnnnnnnnnnnnnnnnnnnnnnnnnnnnnnnnnnnnnnnnnnnnnnnnnnnnnnnnnnnnnnnnnnnnnnnnnnnnnnnnnnnnnnnnnnnnnnnnnnnnnnnnnnnnnnnnnnnnnnnnnnnnnnnnnnnnnnnnnnnnnnnnnnnnnnnnnnnnnnnnnnnnnnnnnnnnnnnnnnnnnnnnnnnnnnnnnnnnnnnnnnnnnnnnnnnnnnnnnnnnnnnnnnnnnnnnnnnnnnnnnnnnnnnnnnnnnnnnnnnnnnnnnnnnnnnnnnnnnnnnnnnnnnnnnnnnnnnnnnnnnnnnnnnnnnnnnnnnnnnnnnnnnnnnnnnnnnnnnnnnnnnnnnnnnnnnnnnnnnnnnnnnnnnnnnnnnnnnnnnnnnnnnnnnnnnnnnnnnnnnnnnnnnnnnnnnnnnnnnnnnnnnnnnnnnnnnnnnnnnnnnnnnnnnnnnnnnnnnnnnnnnnnnnnnnnnnnnnnnnnnnnnnnnnnnnnnnnnnnnnnnnnnnnnnnnnnnnnnnnnnnnnnnnnnnnnnnnnnnnnnnnnnnnnnnnnnnnnnnnnnnnnnnnnnnnnnnnnnnnnnnnnnnnnnnnnnnnnnnnnnnnnnnnnnnnnnnnnnnnnnnnnnnnnnnnnnnnnnnnnnnnnnnnnnnnnnnnnnnnnnnnnnnnnnnnnnnnnnnnnnnnnnnnnnnnnnnnnnnnnnnnnnnnnnnnnnnnnnnnnnnnnnnnnnnnnnnnnnnnnnnnnnnnnnnnnnnnnnnnnnnnnnnnnnnnnnnnnnnnnnnnnnnnnnnnnnnnnnnnnnnnnnnnnnnnnnnnnnnnnnnnnnnnnnnnnnnnnnnnnnnnnnnnnnnnnnnnnnnnnnnnnnnnnnnnnnnnnnnnnnnnnnnnnnnnnnnnnnnnnnnnnnnnnnnnnnnnnnnnnnnnnnnnnnnnnnnnnnnnnnnnnnnnnnnnnnnnnnnnnnnnnnnnnnnnnnnnnnnnnnnnnnnnnnnnnnnnnnnnnnnnnnnnnnnnnnnnnnnnnnnnnnnnnnnnnnnnnnnnnnnnnnnnnnnnnnnnnnnnnnnnnnnnnnnnnnnnnnnnnnnnnnnnnnnnnnnnnnnnnnnnnnnnnnnnnnnnnnnnnnnnnnnnnnnnnnnnnnnnnnnnnnnnnnnnnnnnnnnnnnnnnnnnnnnnnnnnnnnnnnnnnnnnnnnnnnnnnnnnnnnnnnnnnnnnnnnnnnnnnnnnnnnnnnnnnnnnnnnnnnnnnnnnnnnnnnnnnnnnnnnnnnnnnnnnnnnnnnnnnnnnnnnnnnnnnnnnnnnnnnnnnnnnnnnnnnnnnnnnnnnnnnnnnnnnnnnnnnnnnnnnnnnnnnnnnnnnnnnnnnnnnnnnnnnnnnnnnnnnnnnnnnnnnnnnnnnnnnnnnnnnnnnnnnnnnnnnnnnnnnnnnnnnnnnnnnnnnnnnnnnnnnnnnnnnnnnnnnnnnnnnnnnnnnnnnnnnnnnnnnnnnnnnnnnnnnnnnnnnnnnnnnnnnnnnnnnnnnnnnnnnnnnnnnnnnnnnnnnnnnnnnnnnnnnnnnnnnnnnnnnnnnnnnnnnnnnnnnnnnnnnnnnnnnnnnnnnnnnnnnnnnnnnnnnnnnnnnnnnnnnnnnnnnnnnnnnnnnnnnnnnnnnnnnnnnnnnnnnnnnnnnnnnnnnnnnnnnnnnnnnnnnnnnnnnnnnnnnnnnnnnnnnnnnnnnnnnnnnnnnnnnnnnnnnnnnnnnnnnnnnnnnnnnnnnnnnnnnnnnnnnnnnnnnnnnnnnnnnnnnnnnnnnnnnnnnnnnnnnnnnnnnnnnnnnnnnnnnnnnnnnnnnnnnnnnnnnnnnnnnnnnnnnnnnnnnnnnnnnnnnnnnnnnnnnnnnnnnnnnnnnnnnnnnnnnnnnnnnnnnnnnnnnnnnnnnnnnnnnnnnnnnnnnnnnnnnnnnnnnnnnnnnnnnnnnnnnnnnnnnnnnnnnnnnnnnnnnnnnnnnnnnnnnnnnnnnnnnnnnnnnnnnnnnnnnnnnnnnnnnnnnnnnnnnnnnnnnnnnnnnnnnnnnnnnnnnnnnnnnnnnnnnnnnnnnnnnnnnnnnnnnnnnnnnnnnnnnnnnnnnnnnnnnnnnnnnnnnnnnnnnnnnnnnnnnnnnnnnnnnnnnnnnnnnnnnnnnnnnnnnnnnnnnnnnnnnnnnnnnnnnnnnnnnnnnnnnnnnnnnnnnnnnnnnnnnnnnnnnnnnnnnnnnnnnnnnnnnnnnnnnnnnnnnnnnnnnnnnnnnnnnnnnnnnnnnnnnnnnnnnnnnnnnnnnnnnnnnnnnnnnnnnnnnnnnnnnnnnnnnnnnnnnnnnnnnnnnnnnnnnnnnnnnnnnnnnnnnnnnnnnnnnnnnnnnnnnnnnnnnnnnnnnnnnnnnnnnnnnnnnnnnnnnnnnnnnnnnnnnnnnnnnnnnnnnnnnnnnnnnnnnnnnnnnnnnnnnnnnnnnnnnnnnnnnnnnnnnnnnnnnnnnnnnnnnnnnnnnnnnnnnnnnnnnnnnnnnnnnnnnnnnnnnnnnnnnnnnnnnnnnnnnnnnnnnnnnnnnnnnnnnnnnnnnnnnnnnnnnnnnnnnnnnnnnnnnnnnnnnnnnnnnnnnnnnnnnnnnnnnnnnnnnnnnnnnnnnnnnnnnnnnnnnnnnnnnnnnnnnnnnnnnnnnnnnnnnnnnnnnnnnnnnnnnnnnnnnnnnnnnnnnnnnnnnnnnnnnnnnnnnnnnnnnnnnnnnnnnnnnnnnnnnnnnnnnnnnnnnnnnnnnnnnnnnnnnnnnnnnnnnnnnnnnnnnnnnnnnnnnnnnnnnnnnnnnnnnnnnnnnnnnnnnnnnnnnnnnnnnnnnnnnnnnnnnnnnnnnnnnnnnnnnnnnnnnnnnnnnnnnnnnnnnnnnnnnnnnnnnnnnnnnnnnnnnnnnnnnnnnnnnnnnnnnnnnnnnnnnnnnnnnnnnnnnnnnnnnnnnnnnnnnnnnnnnnnnnnnnnnnnnnnnnnnnnnnnnnnnnnnnnnnnnnnnnnnnnnnnnnnnnnnnnnnnnnnnnnnnnnnnnnnnnnnnnnnnnnnnnnnnnnnnnnnnnnnnnnnnnnnnnnnnnnnnnnnnnnnnnnnnnnnnnnnnnnnnnnnnnnnnnnnnnnnnnnnnnnnnnnnnnnnnnnnnnnnnnnnnnnnnnnnnnnnnnnnnnnnnnnnnnnnnnnnnnnnnnnnnnnnnnnnnnnnnnnnnnnnnnnnnnnnnnnnnnnnnnnnnnnnnnnnnnnnnnnnnnnnnnnnnnnnnnnnnnnnnnnnnnnnnnnnnnnnnnnnnnnnnnnnnnnnnnnnnnnnnnnnnnnnnnnnnnnnnnnnnnnnnnnnnnnnnnnnnnnnnnnnnnnnnnnnnnnnnnnnnnnnnnnnnnnnnnnnnnnnnnnnnnnnnnnnnnnnnnnnnnnnnnnnnnnnnnnnnnnnnnnnnnnnnnnnnnnnnnnnnnnnnnnnnnnnnnnnnnnnnnnnnnnnnnnnnnnnnnnnnnnnnnnnnnnnnnnnnnnnnnnnnnnnnnnnnnnnnnnnnnnnnnnnnnnnnnnnnnnnnnnnnnnnnnnnnnnnnnnnnnnnnnnnnnnnnnnnnnnnnnnnnnnnnnnnnnnnnnnnnnnnnnnnnnnnnnnnnnnnnnnnnnnnnnnnnnnnnnnnnnnnnnnnnnnnnnnnnnnnnnnnnnnnnnnnnnnnnnnnnnnnnnnnnnnnnnnnnnnnnnnnnnnnnnnnnnnnnnnnnnnnnnnnnnnnnnnnnnnnnnnnnnnnnnnnnnnnnnnnnnnnnnnnnnnnnnnnnnnnnnnnnnnnnnnnnnnnnnnnnnnnnnnnnnnnnnnnnnnnnnnnnnnnnnnnnnnnnnnnnnnnnnnnnnnnnnnnnnnnnnnnnnnnnnnnnnnnnnnnnnnnnnnnnnnnnnnnnnnnnnnnnnnnnnnnnnnnnnnnnnnnnnnnnnnnnnnnnnnnnnnnnnnnnnnnnnnnnnnnnnnnnnnnnnnnnnnnnnnnnnnnnnnnnnnnnnnnnnnnnnnnnnnnnnnnnnnnnnnnnnnnnnnnnnnnnnnnnnnnnnnnnnnnnnnnnnnnnnnnnnnnnnnnnnnnnnnnnnnnnnnnnnnnnnnnnnnnnnnnnnnnnnnnnnnnnnnnnnnnnnnnnnnnnnnnnnnnnnnnnnnnnnnnnnnnnnnnnnnnnnnnnnnnnnnnnnnnnnnnnnnnnnnnnnnnnnnnnnnnnnnnnnnnnnnnnnnnnnnnnnnnnnnnnnnnnnnnnnnnnnnnnnnnnnnnnnnnnnnnnnnnnnnnnnnnnnnnnnnnnnnnnnnnnnnnnnnnnnnnnnnnnnnnnnnnnnnnnnnnnnnnnnnnnnnnnnnnnnnnnnnnnnnnnnnnnnnnnnnnnnnnnnnnnnnnnnnnnnnnnnnnnnnnnnnnnnnnnnnnnnnnnnnnnnnnnnnnnnnnnnnnnnnnnnnnnnnnnnnnnnnnnnnnnnnnnnnnnnnnnnnnnnnnnnnnnnnnnnnnnnnnnnnnnnnnnnnnnnnnnnnnnnnnnnnnnnnnnnnnnnnnnnnnnnnnnnnnnnnnnnnnnnnnnnnnnnnnnnnnnnnnnnnnnnnnnnnnnnnnnnnnnnnnnnnnnnnnnnnnnnnnnnnnnnnnnnnnnnnnnnnnnnnnnnnnnnnnnnnnnnnnnnnnnnnnnnnnnnnnnnnnnnnnnnnnnnnnnnnnnnnnnnnnnnnnnnnnnnnnnnnnnnnnnnnnnnnnnnnnnnnnnnnnnnnnnnnnnnnnnnnnnnnnnnnnnnnnnnnnnnnnnnnnnnnnnnnnnnnnnnnnnnnnnnnnnnnnnnnnnnnnnnnnnnnnnnnnnnnnnnnnnnnnnnnnnnnnnnnnnnnnnnnnnnnnnnnnnnnnnnnnnnnnnnnnnnnnnnnnnnnnnnnnnnnnnnnnnnnnnnnnnnnnnnnnnnnnnnnnnnnnnnnnnnnnnnnnnnnnnnnnnnnnnnnnnnnnnnnnnnnnnnnnnnnnnnnnnnnnnnnnnnnnnnnnnnnnnnnnnnnnnnnnnnnnnnnnnnnnnnnnnnnnnnnnnnnnnnnnnnnnnnnnnnnnnnnnnnnnnnnnnnnnnnnnnnnnnnnnnnnnnnnnnnnnnnnnnnnnnnnnnnnnnnnnnnnnnnnnnnnnnnnnnnnnnnnnnnnnnnnnnnnnnnnnnnnnnnnnnnnnnnnnnnnnnnnnnnnnnnnnnnnnnnnnnnnnnnnnnnnnnnnnnnnnnnnnnnnnnnnnnnnnnnnnnnnnnnnnnnnnnnnnnnnnnnnnnnnnnnnnnnnnnnnnnnnnnnnnnnnnnnnnnnnnnnnnnnnnnnnnnnnnnnnnnnnnnnnnnnnnnnnnnnnnnnnnnnnnnnnnnnnnnnnnnnnnnnnnnnnnnnnnnnnnnnnnnnnnnnnnnnnnnnnnnnnnnnnnnnnnnnnnnnnnnnnnnnnnnnnnnnnnnnnnnnnnnnnnnnnnnnnnnnnnnnnnnnnnnnnnnnnnnnnnnnnnnnnnnnnnnnnnnnnnnnnnnnnnnnnnnnnnnnnnnnnnnnnnnnnnnnnnnnnnnnnnnnnnnnnnnnnnnnnnnnnnnnnnnnnnnnnnnnnnnnnnnnnnnnnnnnnnnnnnnnnnnnnnnnnnnnnnnnnnnnnnnnnnnnnnnnnnnnnnnnnnnnnnnnnnnnnnnnnnnnnnnnnnnnnnnnnnnnnnnnnnnnnnnnnnnnnnnnnnnnnnnnnnnnnnnnnnnnnnnnnnnnnnnnnnnnnnnnnnnnnnnnnnnnnnnnnnnnnnnnnnnnnnnnnnnnnnnnnnnnnnnnnnnnnnnnnnnnnnnnnnnnnnnnnnnnnnnnnnnnnnnnnnnnnnnnnnnnnnnnnnnnnnnnnnnnnnnnnnnnnnnnnnnnnnnnnnnnnnnnnnnnnnnnnnnnnnnnnnnnnnnnnnnnnnnnnnnnnnnnnnnnnnnnnnnnnnnnnnnnnnnnnnnnnnnnnnnnnnnnnnnnnnnnnnnnnnnnnnnnnnnnnnnnnnnnnnnnnnnnnnnnnnnnnnnnnnnnnnnnnnnnnnnnnnnnnnnnnnnnnnnnnnnnnnnnnnnnnnnnnnnnnnnnnnnnnnnnnnnnnnnnnnnnnnnnnnnnnnnnnnnnnnnnnnnnnnnnnnnnnnnnnnnnnnnnnnnnnnnnnnnnnnnnnnnnnnnnnnnnnnnnnnnnnnnnnnnnnnnnnnnnnnnnnnnnnnnnnnnnnnnnnnnnnnnnnnnnnnnnnnnnnnnnnnnnnnnnnnnnnnnnnnnnnnnnnnnnnnnnnnnnnnnnnnnnnnnnnnnnnnnnnnnnnnnnnnnnnnnnnnnnnnnnnnnnnnnnnnnnnnnnnnnnnnnnnnnnnnnnnnnnnnnnnnnnnnnnnnnnnnnnnnnnnnnnnnnnnnnnnnnnnnnnnnnnnnnnnnnnnnnnnnnnnnnnnnnnnnnnnnnnnnnnnnnnnnnnnnnnnnnnnnnnnnnnnnnnnnnnnnnnnnnnnnnnnnnnnnnnnnnnnnnnnnnnnnnnnnnnnnnnnnnnnnnnnnnnnnnnnnnnnnnnnnnnnnnnnnnnnnnnnnnnnnnnnnnnnnnnnnnnnnnnnnnnnnnnnnnnnnnnnnnnnnnnnnnnnnnnnnnnnnnnnnnnnnnnnnnnnnnnnnnnnnnnnnnnnnnnnnnnnnnnnnnnnnnnnnnnnnnnnnnnnnnnnnnnnnnnnnnnnnnnnnnnnnnnnnnnnnnnnnnnnnnnnnnnnnnnnnnnnnnnnnnnnnnnnnnnnnnnnnnnnnnnnnnnnnnnnnnnnnnnnnnnnnnnnnnnnnnnnnnnnnnnnnnnnnnnnnnnnnnnnnnnnnnnnnnnnnnnnnnnnnnnnnnnnnnnnnnnnnnnnnnnnnnnnnnnnnnnnnnnnnnnnnnnnnnnnnnnnnnnnnnnnnnnnnnnnnnnnnnnnnnnnnnnnnnnnnnnnnnnnnnnnnnnnnnnnnnnnnnnnnnnnnnnnnnnnnnnnnnnnnnnnnnnnnnnnnnnnnnnnnnnnnnnnnnnnnnnnnnnnnnnnnnnnnnnnnnnnnnnnnnnnnnnnnnnnnnnnnnnnnnnnnnnnnnnnnnnnnnnnnnnnnnnnnnnnnnnnnnnnnnnnnnnnnnnnnnnnnnnnnnnnnnnnnnnnnnnnnnnnnnnnnnnnnnnnnnnnnnnnnnnnnnnnnnnnnnnnnnnnnnnnnnnnnnnnnnnnnnnnnnnnnnnnnnnnnnnnnnnnnnnnnnnnnnnnnnnnnnnnnnnnnnnnnnnnnnnnnnnnnnnnnnnnnnnnnnnnnnnnnnnnnnnnnnnnnnnnnnnnnnnnnnnnnnnnnnnnnnnnnnnnnnnnnnnnnnnnnnnnnnnnnnnnnnnnnnnnnnnnnnnnnnnnnnnnnnnnnnnnnnnnnnnnnnnnnnnnnnnnnnnnnnnnnnnnnnnnnnnnnnnnnnnnnnnnnnnnnnnnnnnnnnnnnnnnnnnnnnnnnnnnnnnnnnnnnnnnnnnnnnnnnnnnnnnnnnnnnnnnnnnnnnnnnnnnnnnnnnnnnnnnnnnnnnnnnnnnnnnnnnnnnnnnnnnnnnnnnnnnnnnnnnnnnnnnnnnnnnnnnnnnnnnnnnnnnnnnnnnnnnnnnnnnnnnnnnnnnnnnnnnnnnnnnnnnnnnnnnnnnnnnnnnnnnnnnnnnnnnnnnnnnnnnnnnnnnnnnnnnnnnnnnnnnnnnnnnnnnnnnnnnnnnnnnnnnnnnnnnnnnnnnnnnnnnnnnnnnnnnnnnnnnnnnnnnnnnnnnnnnnnnnnnnnnnnnnnnnnnnnnnnnnnnnnnnnnnnnnnnnnnnnnnnnnnnnnnnnnnnnnnnnnnnnnnnnnnnnnnnnnnnnnnnnnnnnnnnnnnnnnnnnnnnnnnnnnnnnnnnnnnnnnnnnnnnnnnnnnnnnnnnnnnnnnnnnnnnnnnnnnnnnnnnnnnnnnnnnnnnnnnnnnnnnnnnnnnnnnnnnnnnnnnnnnnnnnnnnnnnnnnnnnnnnnnnnnnnnnnnnnnnnnnnnnnnnnnnnnnnnnnnnnnnnnnnnnnnnnnnnnnnnnnnnnnnnnnnnnnnnnnnnnnnnnnnnnnnnnnnnnnnnnnnnnnnnnnnnnnnnnnnnnnnnnnnnnnnnnnnnnnnnnnnnnnnnnnnnnnnnnnnnnnnnnnnnnnnnnnnnnnnnnnnnnnnnnnnnnnnnnnnnnnnnnnnnnnnnnnnnnnnnnnnnnnnnnnnnnnnnnnnnnnnnnnnnnnnnnnnnnnnnnnnnnnnnnnnnnnnnnnnnnnnnnnnnnnnnnnnnnnnnnnnnnnnnnnnnnnnnnnnnnnnnnnnnnnnnnnnnnnnnnnnnnnnnnnnnnnnnnnnnnnnnnnnnnnnnnnnnnnnnnnnnnnnnnnnnnnnnnnnnnnnnnnnnnnnnnnnnnnnnnnnnnnnnnnnnnnnnnnnnnnnnnnnnnnnnnnnnnnnnnnnnnnnnnnnnnnnnnnnnnnnnnnnnnnnnnnnnnnnnnnnnnnnnnnnnnnnnnnnnnnnnnnnnnnnnnnnnnnnnnnnnnnnnnnnnnnnnnnnnnnnnnnnnnnnnnnnnnnnnnnnnnnnnnnnnnnnnnnnnnnnnnnnnnnnnnnnnnnnnnnnnnnnnnnnnnnnnnnnnnnnnnnnnnnnnnnnnnnnnnnnnnnnnnnnnnnnnnnnnnnnnnnnnnnnnnnnnnnnnnnnnnnnnnnnnnnnnnnnnnnnnnnnnnnnnnnnnnnnnnnnnnnnnnnnnnnnnnnnnnnnnnnnnnnnnnnnnnnnnnnnnnnnnnnnnnnnnnnnnnnnnnnnnnnnnnnnnnnnnnnnnnnnnnnnnnnnnnnnnnnnnnnnnnnnnnnnnnnnnnnnnnnnnnnnnnnnnnnnnnnnnnnnnnnnnnnnnnnnnnnnnnnnnnnnnnnnnnnnnnnnnnnnnnnnnnnnnnnnnnnnnnnnnnnnnnnnnnnnnnnnnnnnnnnnnnnnnnnnnnnnnnnnnnnnnnnnnnnnnnnnnnnnnnnnnnnnnnnnnnnnnnnnnnnnnnnnnnnnnnnnnnnnnnnnnnnnnnnnnnnnnnnnnnnnnnnnnnnnnnnnnnnnnnnnnnnnnnnnnnnnnnnnnnnnnnnnnnnnnnnnnnnnnnnnnnnnnnnnnnnnnnnnnnnnnnnnnnnnnnnnnnnnnnnnnnnnnnnnnnnnnnnnnnnnnnnnnnnnnnnnnnnnnnnnnnnnnnnnnnnnnnnnnnnnnnnnnnnnnnnnnnnnnnnnnnnnnnnnnnnnnnnnnnnnnnnnnnnnnnnnnnnnnnnnnnnnnnnnnnnnnnnnnnnnnnnnnnnnnnnnnnnnnnnnnnnnnnnnnnnnnnnnnnnnnnnnnnnnnnnnnnnnnnnnnnnnnnnnnnnnnnnnnnnnnnnnnnnnnnnnnnnnnnnnnnnnnnnnnnnnnnnnnnnnnnnnnnnnnnnnnnnnnnnnnnnnnnnnnnnnnnnnnnnnnnnnnnnnnnnnnnnnnnnnnnnnnnnnnnnnnnnnnnnnnnnnnnnnnnnnnnnnnnnnnnnnnnnnnnnnnnnnnnnnnnnnnnnnnnnnnnnnnnnnnnnnnnnnnnnnnnnnnnnnnnnnnnnnnnnnnnnnnnnnnnnnnnnnnnnnnnnnnnnnnnnnnnnnnnnnnnnnnnnnnnnnnnnnnnnnnnnnnnnnnnnnnnnnnnnnnnnnnnnnnnnnnnnnnnnnnnnnnnnnnnnnnnnnnnnnnnnnnnnnnnnnnnnnnnnnnnnnnnnnnnnnnnnnnnnnnnnnnnnnnnnnnnnnnnnnnnnnnnnnnnnnnnnnnnnnnnnnnnnnnnnnnnnnnnnnnnnnnnnnnnnnnnnnnnnnnnnnnnnnnnnnnnnnnnnnnnnnnnnnnnnnnnnnnnnnnnnnnnnnnnnnnnnnnnnnnnnnnnnnnnnnnnnnnnnnnnnnnnnnnnnnnnnnnnnnnnnnnnnnnnnnnnnnnnnnnnnnnnnnnnnnnnnnnnnnnnnnnnnnnnnnnnnnnnnnnnnnnnnnnnnnnnnnnnnnnnnnnnnnnnnnnnnnnnnnnnnnnnnnnnnnnnnnnnnnnnnnnnnnnnnnnnnnnnnnnnnnnnnnnnnnnnnnnnnnnnnnnnnnnnnnnnnnnnnnnnnnnnnnnnnnnnnnnnnnnnnnnnnnnnnnnnnnnnnnnnnnnnnnnnnnnnnnnnnnnnnnnnnnnnnnnnnnnnnnnnnnnnnnnnnnnnnnnnnnnnnnnnnnnnnnnnnnnnnnnnnnnnnnnnnnnnnnnnnnnnnnnnnnnnnnnnnnnnnnnnnnnnnnnnnnnnnnnnnnnnnnnnnnnnnnnnnnnnnnnnnnnnnnnnnnnnnnnnnnnnnnnnnnnnnnnnnnnnnnnnnnnnnnnnnnnnnnnnnnnnnnnnnnnnnnnnnnnnnnnnnnnnnnnnnnnnnnnnnnnnnnnnnnnnnnnnnnnnnnnnnnnnnnnnnnnnnnnnnnnnnnnnnnnnnnnnnnnnnnnnnnnnnnnnnnnnnnnnnnnnnnnnnnnnnnnnnnnnnnnnnnnnnnnnnnnnnnnnnnnnnnnnnnnnnnnnnnnnnnnnnnnnnnnnnnnnnnnnnnnnnnnnnnnnnnnnnnnnnnnnnnnnnnnnnnnnnnnnnnnnnnnnnnnnnnnnnnnnnnnnnnnnnnnnnnnnnnnnnnnnnnnnnnnnnnnnnnnnnnnnnnnnnnnnnnnnnnnnnnnnnnnnnnnnnnnnnnnnnnnnnnnnnnnnnnnnnnnnnnnnnnnnnnnnnnnnnnnnnnnnnnnnnnnnnnnnnnnnnnnnnnnnnnnnnnnnnnnnnnnnnnnnnnnnnnnnnnnnnnnnnnnnnnnnnnnnnnnnnnnnnnnnnnnnnnnnnnnnnnnnnnnnnnnnnnnnnnnnnnnnnnnnnnnnnnnnnnnnnnnnnnnnnnnnnnnnnnnnnnnnnnnnnnnnnnnnnnnnnnnnnnnnnnnnnnnnnnnnnnnnnnnnnnnnnnnnnnnnnnnnnnnnnnnnnnnnnnnnnnnnnnnnnnnnnnnnnnnnnnnnnnnnnnnnnnnnnnnnnnnnnnnnnnnnnnnnnnnnnnnnnnnnnnnnnnnnnnnnnnnnnnnnnnnnnnnnnnnnnnnnnnnnnnnnnnnnnnnnnnnnnnnnnnnnnnnnnnnnnnnnnnnnnnnnnnnnnnnnnnnnnnnnnnnnnnnnnnnnnnnnnnnnnnnnnnnnnnnnnnnnnnnnnnnnnnnnnnnnnnnnnnnnnnnnnnnnnnnnnnnnnnnnnnnnnnnnnnnnnnnnnnnnnnnnnnnnnnnnnnnnnnnnnnnnnnnnnnnnnnnnnnnnnnnnnnnnnnnnnnnnnnnnnnnnnnnnnnnnnnnnnnnnnnnnnnnnnnnnnnnnnnnnnnnnnnnnnnnnnnnnnnnnnnnnnnnnnnnnnnnnnnnnnnnnnnnnnnnnnnnnnnnnnnnnnnnnnnnnnnnnnnnnnnnnnnnnnnnnnnnnnnnnnnnnnnnnnnnnnnnnnnnnnnnnnnnnnnnnnnnnnnnnnnnnnnnnnnnnnnnnnnnnnnnnnnnnnnnnnnnnnnnnnnnnnnnnnnnnnnnnnnnnnnnnnnnnnnnnnnnnnnnnnnnnnnnnnnnnnnnnnnnnnnnnnnnnnnnnnnnnnnnnnnnnnnnnnnnnnnnnnnnnnnnnnnnnnnnnnnnnnnnnnnnnnnnnnnnnnnnnnnnnnnnnnnnnnnnnnnnnnnnnnnnnnnnnnnnnnnnnnnnnnnnnnnnnnnnnnnnnnnnnnnnnnnnnnnnnnnnnnnnnnnnnnnnnnnnnnnnnnnnnnnnnnnnnnnnnnnnnnnnnnnnnnnnnnnnnnnnnnnnnnnnnnnnnnnnnnnnnnnnnnnnnnnnnnnnnnnnnnnnnnnnnnnnnnnnnnnnnnnnnnnnnnnnnnnnnnnnnnnnnnnnnnnnnnnnnnnnnnnnnnnnnnnnnnnnnnnnnnnnnnnnnnnnnnnnnnnnnnnnnnnnnnnnnnnnnnnnnnnnnnnnnnnnnnnnnnnnnnnnnnnnnnnnnnnnnnnnnnnnnnnnnnnnnnnnnnnnnnnnnnnnnnnnnnnnnnnnnnnnnnnnnnnnnnnnnnnnnnnnnnnnnnnnnnnnnnnnnnnnnnnnnnnnnnnnnnnnnnnnnnnnnnnnnnnnnnnnnnnnnnnnnnnnnnnnnnnnnnnnnnnnnnnnnnnnnnnnnnnnnnnnnnnnnnnnnnnnnnnnnnnnnnnnnnnnnnnnnnnnnnnnnnnnnnnnnnnnnnnnnnnnnnnnnnnnnnnnnnnnnnnnnnnnnnnnnnnnnnnnnnnnnnnnnnnnnnnnnnnnnnnnnnnnnnnnnnnnnnnnnnnnnnnnnnnnnnnnnnnnnnnnnnnnnnnnnnnnnnnnnnnnnnnnnnnnnnnnnnnnnnnnnnnnnnnnnnnnnnnnnnnnnnnnnnnnnnnnnnnnnnnnnnnnnnnnnnnnnnnnnnnnnnnnnnnnnnnnnnnnnnnnnnnnnnnnnnnnnnnnnnnnnnnnnnnnnnnnnnnnnnnnnnnnnnnnnnnnnnnnnnnnnnnnnnnnnnnnnnnnnnnnnnnnnnnnnnnnnnnnnnnnnnnnnnnnnnnnnnnnnnnnnnnnnnnnnnnnnnnnnnnnnnnnnnnnnnnnnnnnnnnnnnnnnnnnnnnnnnnnnnnnnnnnnnnnnnnnnnnnnnnnnnnnnnnnnnnnnnnnnnnnnnnnnnnnnnnnnnnnnnnnnnnnnnnnnnnnnnnnnnnnnnnnnnnnnnnnnnnnnnnnnnnnnnnnnnnnnnnnnnnnnnnnnnnnnnnnnnnnnnnnnnnnnnnnnnnnnnnnnnnnnnnnnnnnnnnnnnnnnnnnnnnnnnnnnnnnnnnnnnnnnnnnnnnnnnnnnnnnnnnnnnnnnnnnnnnnnnnnnnnnnnnnnnnnnnnnnnnnnnnnnnnnnnnnnnnnnnnnnnnnnnnnnnnnnnnnnnnnnnnnnnnnnnnnnnnnnnnnnnnnnnnnnnnnnnnnnnnnnnnnnnnnnnnnnnnnnnnnnnnnnnnnnnnnnnnnnnnnnnnnnnnnnnnnnnnnnnnnnnnnnnnnnnnnnnnnnnnnnnnnnnnnnnnnnnnnnnnnnnnnnnnnnnnnnnnnnnnnnnnnnnnnnnnnnnnnnnnnnnnnnnnnnnnnnnnnnnnnnnnnnnnnnnnnnnnnnnnnnnnnnnnnnnnnnnnnnnnnnnnnnnnnnnnnnnnnnnnnnnnnnnnnnnnnnnnnnnnnnnnnnnnnnnnnnnnnnnnnnnnnnnnnnnnnnnnnnnnnnnnnnnnnnnnnnnnnnnnnnnnnnnnnnnnnnnnnnnnnnnnnnnnnnnnnnnnnnnnnnnnnnnnnnnnnnnnnnnnnnnnnnnnnnnnnnnnnnnnnnnnnnnnnnnnnnnnnnnnnnnnnnnnnnnnnnnnnnnnnnnnnnnnnnnnnnnnnnnnnnnnnnnnnnnnnnnnnnnnnnnnnnnnnnnnnnnnnnnnnnnnnnnnnnnnnnnnnnnnnnnnnnnnnnnnnnnnnnnnnnnnnnnnnnnnnnnnnnnnnnnnnnnnnnnnnnnnnnnnnnnnnnnnnnnnnnnnnnnnnnnnnnnnnnnnnnnnnnnnnnnnnnnnnnnnnnnnnnnnnnnnnnnnnnnnnnnnnnnnnnnnnnnnnnnnnnnnnnnnnnnnnnnnnnnnnnnnnnnnnnnnnnnnnnnnnnnnnnnnnnnnnnnnnnnnnnnnnnnnnnnnnnnnnnnnnnnnnnnnnnnnnnnnnnnnnnnnnnnnnnnnnnnnnnnnnnnnnnnnnnnnnnnnnnnnnnnnnnnnnnnnnnnnnnnnnnnnnnnnnnnnnnnnnnnnnnnnnnnnnnnnnnnnnnnnnnnnnnnnnnnnnnnnnnnnnnnnnnnnnnnnnnnnnnnnnnnnnnnnnnnnnnnnnnnnnnnnnnnnnnnnnnnnnnnnnnnnnnnnnnnnnnnnnnnnnnnnnnnnnnnnnnnnnnnnnnnnnnnnnnnnnnnnnnnnnnnnnnnnnnnnnnnnnnnnnnnnnnnnnnnnnnnnnnnnnnnnnnnnnnnnnnnnnnnnnnnnnnnnnnnnnnnnnnnnnnnnnnnnnnnnnnnnnnnnnnnnnnnnnnnnnnnnnnnnnnnnnnnnnnnnnnnnnnnnnnnnnnnnnnnnnnnnnnnnnnnnnnnnnnnnnnnnnnnnnnnnnnnnnnnnnnnnnnnnnnnnnnnnnnnnnnnnnnnnnnnnnnnnnnnnnnnnnnnnnnnnnnnnnnnnnnnnnnnnnnnnnnnnnnnnnnnnnnnnnnnnnnnnnnnnnnnnnnnnnnnnnnnnnnnnnnnnnnnnnnnnnnnnnnnnnnnnnnnnnnnnnnnnnnnnnnnnnnnnnnnnnnnnnnnnnnnnnnnnnnnnnnnnnnnnnnnnnnnnnnnnnnnnnnnnnnnnnnnnnnnnnnnnnnnnnnnnnnnnnnnnnnnnnnnnnnnnnnnnnnnnnnnnnnnnnnnnnnnnnnnnnnnnnnnnnnnnnnnnnnnnnnnnnnnnnnnnnnnnnnnnnnnnnnnnnnnnnnnnnnnnnnnnnnnnnnnnnnnnnnnnnnnnnnnnnnnnnnnnnnnnnnnnnnnnnnnnnnnnnnnnnnnnnnnnnnnnnnnnnnnnnnnnnnnnnnnnnnnnnnnnnnnnnnnnnnnnnnnnnnnnnnnnnnnnnnnnnnnnnnnnnnnnnnnnnnnnnnnnnnnnnnnnnnnnnnnnnnnnnnnnnnnnnnnnnnnnnnnnnnnnnnnnnnnnnnnnnnnnnnnnnnnnnnnnnnnnnnnnnnnnnnnnnnnnnnnnnnnnnnnnnnnnnnnnnnnnnnnnnnnnnnnnnnnnnnnnnnnnnnnnnnnnnnnnnnnnnnnnnnnnnnnnnnnnnnnnnnnnnnnnnnnnnnnnnnnnnnnnnnnnnnnnnnnnnnnnnnnnnnnnnnnnnnnnnnnnnnnnnnnnnnnnnnnnnnnnnnnnnnnnnnnnnnnnnnnnnnnnnnnnnnnnnnnnnnnnnnnnnnnnnnnnnnnnnnnnnnnnnnnnnnnnnnnnnnnnnnnnnnnnnnnnnnnnnnnnnnnnnnnnnnnnnnnnnnnnnnnnnnnnnnnnnnnnnnnnnnnnnnnnnnnnnnnnnnnnnnnnnnnnnnnnnnnnnnnnnnnnnnnnnnnnnnnnnnnnnnnnnnnnnnnnnnnnnnnnnnnnnnnnnnnnnnnnnnnnnnnnnnnnnnnnnnnnnnnnnnnnnnnnnnnnnnnnnnnnnnnnnnnnnnnnnnnnnnnnnnnnnnnnnnnnnnnnnnnnnnnnnnnnnnnnnnnnnnnnnnnnnnnnnnnnnnnnnnnnnnnnnnnnnnnnnnnnnnnnnnnnnnnnnnnnnnnnnnnnnnnnnnnnnnnnnnnnnnnnnnnnnnnnnnnnnnnnnnnnnnnnnnnnnnnnnnnnnnnnnnnnnnnnnnnnnnnnnnnnnnnnnnnnnnnnnnnnnnnnnnnnnnnnnnnnnnnnnnnnnnnnnnnnnnnnnnnnnnnnnnnnnnnnnnnnnnnnnnnnnnnnnnnnnnnnnnnnnnnnnnnnnnnnnnnnnnnnnnnnnnnnnnnnnnnnnnnnnnnnnnnnnnnnnnnnnnnnnnnnnnnnnnnnnnnnnnnnnnnnnnnnnnnnnnnnnnnnnnnnnnnnnnnnnnnnnnnnnnnnnnnnnnnnnnnnnnnnnnnnnnnnnnnnnnnnnnnnnnnnnnnnnnnnnnnnnnnnnnnnnnnnnnnnnnnnnnnnnnnnnnnnnnnnnnnnnnnnnnnnnnnnnnnnnnnnnnnnnnnnnnnnnnnnnnnnnnnnnnnnnnnnnnnnnnnnnnnnnnnnnnnnnnnnnnnnnnnnnnnnnnnnnnnnnnnnnnnnnnnnnnnnnnnnnnnnnnnnnnnnnnnnnnnnnnnnnnnnnnnnnnnnnnnnnnnnnnnnnnnnnnnnnnnnnnnnnnnnnnnnnnnnnnnnnnnnnnnnnnnnnnnnnnnnnnnnnnnnnnnnnnnnnnnnnnnnnnnnnnnnnnnnnnnnnnnnnnnnnnnnnnnnnnnnnnnnnnnnnnnnnnnnnnnnnnnnnnnnnnnnnnnnnnnnnnnnnnnnnnnnnnnnnnnnnnnnnnnnnnnnnnnnnnnnnnnnnnnnnnnnnnnnnnnnnnnnnnnnnnnnnnnnnnnnnnnnnnnnnnnnnnnnnnnnnnnnnnnnnnnnnnnnnnnnnnnnnnnnnnnnnnnnnnnnnnnnnnnnnnnnnnnnnnnnnnnnnnnnnnnnnnnnnnnnnnnnnnnnnnnnnnnnnnnnnnnnnnnnnnnnnnnnnnnnnnnnnnnnnnnnnnnnnnnnnnnnnnnnnnnnnnnnnnnnnnnnnnnnnnnnnnnnnnnnnnnnnnnnnnnnnnnnnnnnnnnnnnnnnnnnnnnnnnnnnnnnnnnnnnnnnnnnnnnnnnnnnnnnnnnnnnnnnnnnnnnnnnnnnnnnnnnnnnnnnnnnnnnnnnnnnnnnnnnnnnnnnnnnnnnnnnnnnnnnnnnnnnnnnnnnnnnnnnnnnnnnnnnnnnnnnnnnnnnnnnnnnnnnnnnnnnnnnnnnnnnnnnnnnnnnnnnnnnnnnnnnnnnnnnnnnnnnnnnnnnnnnnnnnnnnnnnnnnnnnnnnnnnnnnnnnnnnnnnnnnnnnnnnnnnnnnnnnnnnnnnnnnnnnnnnnnnnnnnnnnnnnnnnnnnnnnnnnnnnnnnnnnnnnnnnnnnnnnnnnnnnnnnnnnnnnnnnnnnnnnnnnnnnnnnnnnnnnnnnnnnnnnnnnnnnnnnnnnnnnnnnnnnnnnnnnnnnnnnnnnnnnnnnnnnnnnnnnnnnnnnnnnnnnnnnnnnnnnnnnnnnnnnnnnnnnnnnnnnnnnnnnnnnnnnnnnnnnnnnnnnnnnnnnnnnnnnnnnnnnnnnnnnnnnnnnnnnnnnnnnnnnnnnnnnnnnnnnnnnnnnnnnnnnnnnnnnnnnnnnnnnnnnnnnnnnnnnnnnnnnnnnnnnnnnnnnnnnnnnnnnnnnnnnnnnnnnnnnnnnnnnnnnnnnnnnnnnnnnnnnnnnnnnnnnnnnnnnnnnnnnnnnnnnnnnnnnnnnnnnnnnnnnnnnnnnnnnnnnnnnnnnnnnnnnnnnnnnnnnnnnnnnnnnnnnnnnnnnnnnnnnnnnnnnnnnnnnnnnnnnnnnnnnnnnnnnnnnnnnnnnnnnnnnnnnnnnnnnnnnnnnnnnnnnnnnnnnnnnnnnnnnnnnnnnnnnnnnnnnnnnnnnnnnnnnnnnnnnnnnnnnnnnnnnnnnnnnnnnnnnnnnnnnnnnnnnnnnnnnnnnnnnnnnnnnnnnnnnnnnnnnnnnnnnnnnnnnnnnnnnnnnnnnnnnnnnnnnnnnnnnnnnnnnnnnnnnnnnnnnnnnnnnnnnnnnnnnnnnnnnnnnnnnnnnnnnnnnnnnnnnnnnnnnnnnnnnnnnnnnnnnnnnnnnnnnnnnnnnnnnnnnnnnnnnnnnnnnnnnnnnnnnnnnnnnnnnnnnnnnnnnnnnnnnnnnnnnnnnnnnnnnnnnnnnnnnnnnnnnnnnnnnnnnnnnnnnnnnnnnnnnnnnnnnnnnnnnnnnnnnnnnnnnnnnnnnnnnnnnnnnnnnnnnnnnnnnnnnnnnnnnnnnnnnnnnnnnnnnnnnnnnnnnnnnnnnnnnnnnnnnnnnnnnnnnnnnnnnnnnnnnnnnnnnnnnnnnnnnnnnnnnnnnnnnnnnnnnnnnnnnnnnnnnnnnnnnnnnnnnnnnnnnnnnnnnnnnnnnnnnnnnnnnnnnnnnnnnnnnnnnnnnnnnnnnnnnnnnnnnnnnnnnnnnnnnnnnnnnnnnnnnnnnnnnnnnnnnnnnnnnnnnnnnnnnnnnnnnnnnnnnnnnnnnnnnnnnnnnnnnnnnnnnnnnnnnnnnnnnnnnnnnnnnnnnnnnnnnnnnnnnnnnnnnnnnnnnnnnnnnnnnnnnnnnnnnnnnnnnnnnnnnnnnnnnnnnnnnnnnnnnnnnnnnnnnnnnnnnnnnnnnnnnnnnnnnnnnnnnnnnnnnnnnnnnnnnnnnnnnnnnnnnnnnnnnnnnnnnnnnnnnnnnnnnnnnnnnnnnnnnnnnnnnnnnnnnnnnnnnnnnnnnnnnnnnnnnnnnnnnnnnnnnnnnnnnnnnnnnnnnnnnnnnnnnnnnnnnnnnnnnnnnnnnnnnnnnnnnnnnnnnnnnnnnnnnnnnnnnnnnnnnnnnnnnnnnnnnnnnnnnnnnnnnnnnnnnnnnnnnnnnnnnnnnnnnnnnnnnnnnnnnnnnnnnnnnnnnnnnnnnnnnnnnnnnnnnnnnnnnnnnnnnnnnnnnnnnnnnnnnnnnnnnnnnnnnnnnnnnnnnnnnnnnnnnnnnnnnnnnnnnnnnnnnnnnnnnnnnnnnnnnnnnnnnnnnnnnnnnnnnnnnnnnnnnnnnnnnnnnnnnnnnnnnnnnnnnnnnnnnnnnnnnnnnnnnnnnnnnnnnnnnnnnnnnnnnnnnnnnnnnnnnnnnnnnnnnnnnnnnnnnnnnnnnnnnnnnnnnnnnnnnnnnnnnnnnnnnnnnnnnnnnnnnnnnnnnnnnnnnnnnnnnnnnnnnnnnnnnnnnnnnnnnnnnnnnnnnnnnnnnnnnnnnnnnnnnnnnnnnnnnnnnnnnnnnnnnnnnnnnnnnnnnnnnnnnnnnnnnnnnnnnnnnnnnnnnnnnnnnnnnnnnnnnnnnnnnnnnnnnnnnnnnnnnnnnnnnnnnnnnnnnnnnnnnnnnnnnnnnnnnnnnnnnnnnnnnnnnnnnnnnnnnnnnnnnnnnnnnnnnnnnnnnnnnnnnnnnnnnnnnnnnnnnnnnnnnnnnnnnnnnnnnnnnnnnnnnnnnnnnnnnnnnnnnnnnnnnnnnnnnnnnnnnnnnnnnnnnnnnnnnnnnnnnnnnnnnnnnnnnnnnnnnnnnnnnnnnnnnnnnnnnnnnnnnnnnnnnnnnnnnnnnnnnnnnnnnnnnnnnnnnnnnnnnnnnnnnnnnnnnnnnnnnnnnnnnnnnnnnnnnnnnnnnnnnnnnnnnnnnnnnnnnnnnnnnnnnnnnnnnnnnnnnnnnnnnnnnnnnnnnnnnnnnnnnnnnnnnnnnnnnnnnnnnnnnnnnnnnnnnnnnnnnnnnnnnnnnnnnnnnnnnnnnnnnnnnnnnnnnnnnnnnnnnnnnnnnnnnnnnnnnnnnnnnnnnnnnnnnnnnnnnnnnnnnnnnnnnnnnnnnnnnnnnnnnnnnnnnnnnnnnnnnnnnnnnnnnnnnnnnnnnnnnnnnnnnnnnnnnnnnnnnnnnnnnnnnnnnnnnnnnnnnnnnnnnnnnnnnnnnnnnnnnnnnnnnnnnnnnnnnnnnnnnnnnnnnnnnnnnnnnnnnnnnnnnnnnnnnnnnnnnnnnnnnnnnnnnnnnnnnnnnnnnnnnnnnnnnnnnnnnnnnnnnnnnnnnnnnnnnnnnnnnnnnnnnnnnnnnnnnnnnnnnnnnnnnnnnnnnnnnnnnnnnnnnnnnnnnnnnnnnnnnnnnnnnnnnnnnnnnnnnnnnnnnnnnnnnnnnnnnnnnnnnnnnnnnnnnnnnnnnnnnnnnnnnnnnnnnnnnnnnnnnnnnnnnnnnnnnnnnnnnnnnnnnnnnnnnnnnnnnnnnnnnnnnnnnnnnnnnnnnnnnnnnnnnnnnnnnnnnnnnnnnnnnnnnnnnnnnnnnnnnnnnnnnnnnnnnnnnnnnnnnnnnnnnnnnnnnnnnnnnnnnnnnnnnnnnnnnnnnnnnnnnnnnnnnnnnnnnnnnnnnnnnnnnnnnnnnnnnnnnnnnnnnnnnnnnnnnnnnnnnnnnnnnnnnnnnnnnnnnnnnnnnnnnnnnnnnnnnnnnnnnnnnnnnnnnnnnnnnnnnnnnnnnnnnnnnnnnnnnnnnnnnnnnnnnnnnnnnnnnnnnnnnnnnnnnnnnnnnnnnnnnnnnnnnnnnnnnnnnnnnnnnnnnnnnnnnnnnnnnnnnnnnnnnnnnnnnnnnnnnnnnnnnnnnnnnnnnnnnnnnnnnnnnnnnnnnnnnnnnnnnnnnnnnnnnnnnnnnnnnnnnnnnnnnnnnnnnnnnnnnnnnnnnnnnnnnnnnnnnnnnnnnnnnnnnnnnnnnnnnnnnnnnnnnnnnnnnnnnnnnnnnnnnnnnnnnnnnnnnnnnnnnnnnnnnnnnnnnnnnnnnnnnnnnnnnnnnnnnnnnnnnnnnnnnnnnnnnnnnnnnnnnnnnnnnnnnnnnnnnnnnnnnnnnnnnnnnnnnnnnnnnnnnnnnnnnnnnnnnnnnnnnnnnnnnnnnnnnnnnnnnnnnnnnnnnnnnnnnnnnnnnnnnnnnnnnnnnnnnnnnnnnnnnnnnnnnnnnnnnnnnnnnnnnnnnnnnnnnnnnnnnnnnnnnnnnnnnnnnnnnnnnnnnnnnnnnnnnnnnnnnnnnnnnnnnnnnnnnnnnnnnnnnnnnnnnnnnnnnnnnnnnnnnnnnnnnnnnnnnnnnnnnnnnnnnnnnnnnnnnnnnnnnnnnnnnnnnnnnnnnnnnnnnnnnnnnnnnnnnnnnnnnnnnnnnnnnnnnnnnnnnnnnnnnnnnnnnnnnnnnnnnnnnnnnnnnnnnnnnnnnnnnnnnnnnnnnnnnnnnnnnnnnnnnnnnnnnnnnnnnnnnnnnnnnnnnnnnnnnnnnnnnnnnnnnnnnnnnnnnnnnnnnnnnnnnnnnnnnnnnnnnnnnnnnnnnnnnnnnnnnnnnnnnnnnnnnnnnnnnnnnnnnnnnnnnnnnnnnnnnnnnnnnnnnnnnnnnnnnnnnnnnnnnnnnnnnnnnnnnnnnnnnnnnnnnnnnnnnnnnnnnnnnnnnnnnnnnnnnnnnnnnnnnnnnnnnnnnnnnnnnnnnnnnnnnnnnnnnnnnnnnnnnnnnnnnnnnnnnnnnnnnnnnnnnnnnnnnnnnnnnnnnnnnnnnnnnnnnnnnnnnnnnnnnnnnnnnnnnnnnnnnnnnnnnnnnnnnnnnnnnnnnnnnnnnnnnnnnnnnnnnnnnnnnnnnnnnnnnnnnnnnnnnnnnnnnnnnnnnnnnnnnnnnnnnnnnnnnnnnnnnnnnnnnnnnnnnnnnnnnnnnnnnnnnnnnnnnnnnnnnnnnnnnnnnnnnnnnnnnnnnnnnnnnnnnnnnnnnnnnnnnnnnnnnnnnnnnnnnnnnnnnnnnnnnnnnnnnnnnnnnnnnnnnnnnnnnnnnnnnnnnnnnnnnnnnnnnnnnnnnnnnnnnnnnnnnnnnnnnnnnnnnnnnnnnnnnnnnnnnnnnnnnnnnnnnnnnnnnnnnnnnnnnnnnnnnnnnnnnnnnnnnnnnnnnnnnnnnnnnnnnnnnnnnnnnnnnnnnnnnnnnnnnnnnnnnnnnnnnnnnnnnnnnnnnnnnnnnnnnnnnnnnnnnnnnnnnnnnnnnnnnnnnnnnnnnnnnnnnnnnnnnnnnnnnnnnnnnnnnnnnnnnnnnnnnnnnnnnnnnnnnnnnnnnnnnnnnnnnnnnnnnnnnnnnnnnnnnnnnnnnnnnnnnnnnnnnnnnnnnnnnnnnnnnnnnnnnnnnnnnnnnnnnnnnnnnnnnnnnnnnnnnnnnnnnnnnnnnnnnnnnnnnnnnnnnnnnnnnnnnnnnnnnnnnnnnnnnnnnnnnnnnnnnnnnnnnnnnnnnnnnnnnnnnnnnnnnnnnnnnnnnnnnnnnnnnnnnnnnnnnnnnnnnnnnnnnnnnnnnnnnnnnnnnnnnnnnnnnnnnnnnnnnnnnnnnnnnnnnnnnnnnnnnnnnnnnnnnnnnnnnnnnnnnnnnnnnnnnnnnnnnnnnnnnnnnnnnnnnnnnnnnnnnnnnnnnnnnnnnnnnnnnnnnnnnnnnnnnnnnnnnnnnnnnnnnnnnnnnnnnnnnnnnnnnnnnnnnnnnnnnnnnnnnnnnnnnnnnnnnnnnnnnnnnnnnnnnnnnnnnnnnnnnnnnnnnnnnnnnnnnnnnnnnnnnnnnnnnnnnnnnnnnnnnnnnnnnnnnnnnnnnnnnnnnnnnnnnnnnnnnnnnnnnnnnnnnnnnnnnnnnnnnnnnnnnnnnnnnnnnnnnnnnnnnnnnnnnnnnnnnnnnnnnnnnnnnnnnnnnnnnnnnnnnnnnnnnnnnnnnnnnnnnnnnnnnnnnnnnnnnnnnnnnnnnnnnnnnnnnnnnnnnnnnnnnnnnnnnnnnnnnnnnnnnnnnnnnnnnnnnnnnnnnnnnnnnnnnnnnnnnnnnnnnnnnnnnnnnnnnnnnnnnnnnnnnnnnnnnnnnnnnnnnnnnnnnnnnnnnnnnnnnnnnnnnnnnnnnnnnnnnnnnnnnnnnnnnnnnnnnnnnnnnnnnnnnnnnnnnnnnnnnnnnnnnnnnnnnnnnnnnnnnnnnnnnnnnnnnnnnnnnnnnnnnnnnnnnnnnnnnnnnnnnnnnnnnnnnnnnnnnnnnnnnnnnnnnnnnnnnnnnnnnnnnnnnnnnnnnnnnnnnnnnnnnnnnnnnnnnnnnnnnnnnnnnnnnnnnnnnnnnnnnnnnnnnnnnnnnnnnnnnnnnnnnnnnnnnnnnnnnnnnnnnnnnnnnnnnnnnnnnnnnnnnnnnnnnnnnnnnnnnnnnnnnnnnnnnnnnnnnnnnnnnnnnnnnnnnnnnnnnnnnnnnnnnnnnnnnnnnnnnnnnnnnnnnnnnnnnnnnnnnnnnnnnnnnnnnnnnnnnnnnnnnnnnnnnnnnnnnnnnnnnnnnnnnnnnnnnnnnnnnnnnnnnnnnnnnnnnnnnnnnnnnnnnnnnnnnnnnnnnnnnnnnnnnnnnnnnnnnnnnnnnnnnnnnnnnnnnnnnnnnnnnnnnnnnnnnnnnnnnnnnnnnnnnnnnnnnnnnnnnnnnnnnnnnnnnnnnnnnnnnnnnnnnnnnnnnnnnnnnnnnnnnnnnnnnnnnnnnnnnnnnnnnnnnnnnnnnnnnnnnnnnnnnnnnnnnnnnnnnnnnnnnnnnnnnnnnnnnnnnnnnnnnnnnnnnnnnnnnnnnnnnnnnnnnnnnnnnnnnnnnnnnnnnnnnnnnnnnnnnnnnnnnnnnnnnnnnnnnnnnnnnnnnnnnnnnnnnnnnnnnnnnnnnnnnnnnnnnnnnnnnnnnnnnnnnnnnnnnnnnnnnnnnnnnnnnnnnnnnnnnnnnnnnnnnnnnnnnnnnnnnnnnnnnnnnnnnnnnnnnnnnnnnnnnnnnnnnnnnnnnnnnnnnnnnnnnnnnnnnnnnnnnnnnnnnnnnnnnnnnnnnnnnnnnnnnnnnnnnnnnnnnnnnnnnnnnnnnnnnnnnnnnnnnnnnnnnnnnnnnnnnnnnnnnnnnnnnnnnnnnnnnnnnnnnnnnnnnnnnnnnnnnnnnnnnnnnnnnnnnnnnnnnnnnnnnnnnnnnnnnnnnnnnnnnnnnnnnnnnnnnnnnnnnnnnnnnnnnnnnnnnnnnnnnnnnnnnnnnnnnnnnnnnnnnnnnnnnnnnnnnnnnnnnnnnnnnnnnnnnnnnnnnnnnnnnnnnnnnnnnnnnnnnnnnnnnnnnnnnnnnnnnnnnnnnnnnnnnnnnnnnnnnnnnnnnnnnnnnnnnnnnnnnnnnnnnnnnnnnnnnnnnnnnnnnnnnnnnnnnnnnnnnnnnnnnnnnnnnnnnnnnnnnnnnnnnnnnnnnnnnnnnnnnnnnnnnnnnnnnnnnnnnnnnnnnnnnnnnnnnnnnnnnnnnnnnnnnnnnnnnnnnnnnnnnnnnnnnnnnnnnnnnnnnnnnnnnnnnnnnnnnnnnnnnnnnnnnnnnnnnnnnnnnnnnnnnnnnnnnnnnnnnnnnnnnnnnnnnnnnnnnnnnnnnnnnnnnnnnnnnnnnnnnnnnnnnnnnnnnnnnnnnnnnnnnnnnnnnnnnnnnnnnnnnnnnnnnnnnnnnnnnnnnnnnnnnnnnnnnnnnnnnnnnnnnnnnnnnnnnnnnnnnnnnnnnnnnnnnnnnnnnnnnnnnnnnnnnnnnnnnnnnnnnnnnnnnnnnnnnnnnnnnnnnnnnnnnnnnnnnnnnnnnnnnnnnnnnnnnnnnnnnnnnnnnnnnnnnnnnnnnnnnnnnnnnnnnnnnnnnnnnnnnnnnnnnnnnnnnnnnnnnnnnnnnnnnnnnnnnnnnnnnnnnnnnnnnnnnnnnnnnnnnnnnnnnnnnnnnnnnnnnnnnnnnnnnnnnnnnnnnnnnnnnnnnnnnnnnnnnnnnnnnnnnnnnnnnnnnnnnnnnnnnnnnnnnnnnnnnnnnnnnnnnnnnnnnnnnnnnnnnnnnnnnnnnnnnnnnnnnnnnnnnnnnnnnnnnnnnnnnnnnnnnnnnnnnnnnnnnnnnnnnnnnnnnnnnnnnnnnnnnnnnnnnnnnnnnnnnnnnnnnnnnnnnnnnnnnnnnnnnnnnnnnnnnnnnnnnnnnnnnnnnnnnnnnnnnnnnnnnnnnnnnnnnnnnnnnnnnnnnnnnnnnnnnnnnnnnnnnnnnnnnnnnnnnnnnnnnnnnnnnnnnnnnnnnnnnnnnnnnnnnnnnnnnnnnnnnnnnnnnnnnnnnnnnnnnnnnnnnnnnnnnnnnnnnnnnnnnnnnnnnnnnnnnnnnnnnnnnnnnnnnnnnnnnnnnnnnnnnnnnnnnnnnnnnnnnnnnnnnnnnnnnnnnnnnnnnnnnnnnnnnnnnnnnnnnnnnnnnnnnnnnnnnnnnnnnnnnnnnnnnnnnnnnnnnnnnnnnnnnnnnnnnnnnnnnnnnnnnnnnnnnnnnnnnnnnnnnnnnnnnnnnnnnnnnnnnnnnnnnnnnnnnnnnnnnnnnnnnnnnnnnnnnnnnnnnnnnnnnnnnnnnnnnnnnnnnnnnnnnnnnnnnnnnnnnnnnnnnnnnnnnnnnnnnnnnnnnnnnnnnnnnnnnnnnnnnnnnnnnnnnnnnnnnnnnnnnnnnnnnnnnnnnnnnnnnnnnnnnnnnnnnnnnnnnnnnnnnnnnnnnnnnnnnnnnnnnnnnnnnnnnnnnnnnnnnnnnnnnnnnnnnnnnnnnnnnnnnnnnnnnnnnnnnnnnnnnnnnnnnnnnnnnnnnnnnnnnnnnnnnnnnnnnnnnnnnnnnnnnnnnnnnnnnnnnnnnnnnnnnnnnnnnnnnnnnnnnnnnnnnnnnnnnnnnnnnnnnnnnnnnnnnnnnnnnnnnnnnnnnnnnnnnnnnnnnnnnnnnnnnnnnnnnnnnnnnnnnnnnnnnnnnnnnnnnnnnnnnnnnnnnnnnnnnnnnnnnnnnnnnnnnnnnnnnnnnnnnnnnnnnnnnnnnnnnnnnnnnnnnnnnnnnnnnnnnnnnnnnnnnnnnnnnnnnnnnnnnnnnnnnnnnnnnnnnnnnnnnnnnnnnnnnnnnnnnnnnnnnnnnnnnnnnnnnnnnnnnnnnnnnnnnnnnnnnnnnnnnnnnnnnnnnnnnnnnnnnnnnnnnnnnnnnnnnnnnnnnnnnnnnnnnnnnnnnnnnnnnnnnnnnnnnnnnnnnnnnnnnnnnnnnnnnnnnnnnnnnnnnnnnnnnnnnnnnnnnnnnnnnnnnnnnnnnnnnnnnnnnnnnnnnnnnnnnnnnnnnnnnnnnnnnnnnnnnnnnnnnnnnnnnnnnnnnnnnnnnnnnnnnnnnnnnnnnnnnnnnnnnnnnnnnnnnnnnnnnnnnnnnnnnnnnnnnnnnnnnnnnnnnnnnnnnnnnnnnnnnnnnnnnnnnnnnnnnnnnnnnnnnnnnnnnnnnnnnnnnnnnnnnnnnnnnnnnnnnnnnnnnnnnnnnnnnnnnnnnnnnnnnnnnnnnnnnnnnnnnnnnnnnnnnnnnnnnnnnnnnnnnnnnnnnnnnnnnnnnnnnnnnnnnnnnnnnnnnnnnnnnnnnnnnnnnnnnnnnnnnnnnnnnnnnnnnnnnnnnnnnnnnnnnnnnnnnnnnnnnnnnnnnnnnnnnnnnnnnnnnnnnnnnnnnnnnnnnnnnnnnnnnnnnnnnnnnnnnnnnnnnnnnnnnnnnnnnnnnnnnnnnnnnnnnnnnnnnnnnnnnnnnnnnnnnnnnnnnnnnnnnnnnnnnnnnnnnnnnnnnnnnnnnnnnnnnnnnnnnnnnnnnnnnnnnnnnnnnnnnnnnnnnnnnnnnnnnnnnnnnnnnnnnnnnnnnnnnnnnnnnnnnnnnnnnnnnnnnnnnnnnnnnnnnnnnnnnnnnnnnnnnnnnnnnnnnnnnnnnnnnnnnnnnnnnnnnnnnnnnnnnnnnnnnnnnnnnnnnnnnnnnnnnnnnnnnnnnnnnnnnnnnnnnnnnnnnnnnnnnnnnnnnnnnnnnnnnnnnnnnnnnnnnnnnnnnnnnnnnnnnnnnnnnnnnnnnnnnnnnnnnnnnnnnnnnnnnnnnnnnnnnnnnnnnnnnnnnnnnnnnnnnnnnnnnnnnnnnnnnnnnnnnnnnnnnnnnnnnnnnnnnnnnnnnnnnnnnnnnnnnnnnnnnnnnnnnnnnnnnnnnnnnnnnnnnnnnnnnnnnnnnnnnnnnnnnnnnnnnnnnnnnnnnnnnnnnnnnnnnnnnnnnnnnnnnnnnnnnnnnnnnnnnnnnnnnnnnnnnnnnnnnnnnnnnnnnnnnnnnnnnnnnnnnnnnnnnnnnnnnnnnnnnnnnnnnnnnnnnnnnnnnnnnnnnnnnnnnnnnnnnnnnnnnnnnnnnnnnnnnnnnnnnnnnnnnnnnnnnnnnnnnnnnnnnnnnnnnnnnnnnnnnnnnnnnnnnnnnnnnnnnnnnnnnnnnnnnnnnnnnnnnnnnnnnnnnnnnnnnnnnnnnnnnnnnnnnnnnnnnnnnnnnnnnnnnnnnnnnnnnnnnnnnnnnnnnnnnnnnnnnnnnnnnnnnnnnnnnnnnnnnnnnnnnnnnnnnnnnnnnnnnnnnnnnnnnnnnnnnnnnnnnnnnnnnnnnnnnnnnnnnnnnnnnnnnnnnnnnnnnnnnnnnnnnnnnnnnnnnnnnnnnnnnnnnnnnnnnnnnnnnnnnnnnnnnnnnnnnnnnnnnnnnnnnnnnnnnnnnnnnnnnnnnnnnnnnnnnnnnnnnnnnnnnnnnnnnnnnnnnnnnnnnnnnnnnnnnnnnnnnnnnnnnnnnnnnnnnnnnnnnnnnnnnnnnnnnnnnnnnnnnnnnnnnnnnnnnnnnnnnnnnnnnnnnnnnnnnnnnnnnnnnnnnnnnnnnnnnnnnnnnnnnnnnnnnnnnnnnnnnnnnnnnnnnnnnnnnnnnnnnnnnnnnnnnnnnnnnnnnnnnnnnnnnnnnnnnnnnnnnnnnnnnnnnnnnnnnnnnnnnnnnnnnnnnnnnnnnnnnnnnnnnnnnnnnnnnnnnnnnnnnnnnnnnnnnnnnnnnnnnnnnnnnnnnnnnnnnnnnnnnnnnnnnnnnnnnnnnnnnnnnnnnnnnnnnnnnnnnnnnnnnnnnnnnnnnnnnnnnnnnnnnnnnnnnnnnnnnnnnnnnnnnnnnnnnnnnnnnnnnnnnnnnnnnnnnnnnnnnnnnnnnnnnnnnnnnnnnnnnnnnnnnnnnnnnnnnnnnnnnnnnnnnnnnnnnnnnnnnnnnnnnnnnnnnnnnnnnnnnnnnnnnnnnnnnnnnnnnnnnnnnnnnnnnnnnnnnnnnnnnnnnnnnnnnnnnnnnnnnnnnnnnnnnnnnnnnnnnnnnnnnnnnnnnnnnnnnnnnnnnnnnnnnnnnnnnnnnnnnnnnnnnnnnnnnnnnnnnnnnnnnnnnnnnnnnnnnnnnnnnnnnnnnnnnnnnnnnnnnnnnnnnnnnnnnnnnnnnnnnnnnnnnnnnnnnnnnnnnnnnnnnnnnnnnnnnnnnnnnnnnnnnnnnnnnnnnnnnnnnnnnnnnnnnnnnnnnnnnnnnnnnnnnnnnnnnnnnnnnnnnnnnnnnnnnnnnnnnnnnnnnnnnnnnnnnnnnnnnnnnnnnnnnnnnnnnnnnnnnnnnnnnnnnnnnnnnnnnnnnnnnnnnnnnnnnnnnnnnnnnnnnnnnnnnnnnnnnnnnnnnnnnnnnnnnnnnnnnnnnnnnnnnnnnnnnnnnnnnnnnnnnnnnnnnnnnnnnnnnnnnnnnnnnnnnnnnnnnnnnnnnnnnnnnnnnnnnnnnnnnnnnnnnnnnnnnnnnnnnnnnnnnnnnnnnnnnnnnnnnnnnnnnnnnnnnnnnnnnnnnnnnnnnnnnnnnnnnnnnnnnnnnnnnnnnnnnnnnnnnnnnnnnnnnnnnnnnnnnnnnnnnnnnnnnnnnnnnnnnnnnnnnnnnnnnnnnnnnnnnnnnnnnnnnnnnnnnnnnnnnnnnnnnnnnnnnnnnnnnnnnnnnnnnnnnnnnnnnnnnnnnnnnnnnnnnnnnnnnnnnnnnnnnnnnnnnnnnnnnnnnnnnnnnnnnnnnnnnnnnnnnnnnnnnnnnnnnnnnnnnnnnnnnnnnnnnnnnnnnnnnnnnnnnnnnnnnnnnnnnnnnnnnnnnnnnnnnnnnnnnnnnnnnnnnnnnnnnnnnnnnnnnnnnnnnnnnnnnnnnnnnnnnnnnnnnnnnnnnnnnnnnnnnnnnnnnnnnnnnnnnnnnnnnnnnnnnnnnnnnnnnnnnnnnnnnnnnnnnnnnnnnnnnnnnnnnnnnnnnnnnnnnnnnnnnnnnnnnnnnnnnnnnnnnnnnnnnnnnnnnnnnnnnnnnnnnnnnnnnnnnnnnnnnnnnnnnnnnnnnnnnnnnnnnnnnnnnnnnnnnnnnnnnnnnnnnnnnnnnnnnnnnnnnnnnnnnnnnnnnnnnnnnnnnnnnnnnnnnnnnnnnnnnnnnnnnnnnnnnnnnnnnnnnnnnnnnnnnnnnnnnnnnnnnnnnnnnnnnnnnnnnnnnnnnnnnnnnnnnnnnnnnnnnnnnnnnnnnnnnnnnnnnnnnnnnnnnnnnnnnnnnnnnnnnnnnnnnnnnnnnnnnnnnnnnnnnnnnnnnnnnnnnnnnnnnnnnnnnnnnnnnnnnnnnnnnnnnnnnnnnnnnnnnnnnnnnnnnnnnnnnnnnnnnnnnnnnnnnnnnnnnnnnnnnnnnnnnnnnnnnnnnnnnnnnnnnnnnnnnnnnnnnnnnnnnnnnnnnnnnnnnnnnnnnnnnnnnnnnnnnnnnnnnnnnnnnnnnnnnnnnnnnnnnnnnnnnnnnnnnnnnnnnnnnnnnnnnnnnnnnnnnnnnnnnnnnnnnnnnnnnnnnnnnnnnnnnnnnnnnnnnnnnnnnnnnnnnnnnnnnnnnnnnnnnnnnnnnnnnnnnnnnnnnnnnnnnnnnnnnnnnnnnnnnnnnnnnnnnnnnnnnnnnnnnnnnnnnnnnnnnnnnnnnnnnnnnnnnnnnnnnnnnnnnnnnnnnnnnnnnnnnnnnnnnnnnnnnnnnnnnnnnnnnnnnnnnnnnnnnnnnnnnnnnnnnnnnnnnnnnnnnnnnnnnnnnnnnnnnnnnnnnnnnnnnnnnnnnnnnnnnnnnnnnnnnnnnnnnnnnnnnnnnnnnnnnnnnnnnnnnnnnnnnnnnnnnnnnnnnnnnnnnnnnnnnnnnnnnnnnnnnnnnnnnnnnnnnnnnnnnnnnnnnnnnnnnnnnnnnnnnnnnnnnnnnnnnnnnnnnnnnnnnnnnnnnnnnnnnnnnnnnnnnnnnnnnnnnnnnnnnnnnnnnnnnnnnnnnnnnnnnnnnnnnnnnnnnnnnnnnnnnnnnnnnnnnnnnnnnnnnnnnnnnnnnnnnnnnnnnnnnnnnnnnnnnnnnnnnnnnnnnnnnnnnnnnnnnnnnnnnnnnnnnnnnnnnnnnnnnnnnnnnnnnnnnnnnnnnnnnnnnnnnnnnnnnnnnnnnnnnnnnnnnnnnnnnnnnnnnnnnnnnnnnnnnnnnnnnnnnnnnnnnnnnnnnnnnnnnnnnnnnnnnnnnnnnnnnnnnnnnnnnnnnnnnnnnnnnnnnnnnnnnnnnnnnnnnnnnnnnnnnnnnnnnnnnnnnnnnnnnnnnnnnnnnnnnnnnnnnnnnnnnnnnnnnnnnnnnnnnnnnnnnnnnnnnnnnnnnnnnnnnnnnnnnnnnnnnnnnnnnnnnnnnnnnnnnnnnnnnnnnnnnnnnnnnnnnnnnnnnnnnnnnnnnnnnnnnnnnnnnnnnnnnnnnnnnnnnnnnnnnnnnnnnnnnnnnnnnnnnnnnnnnnnnnnnnnnnnnnnnnnnnnnnnnnnnnnnnnnnnnnnnnnnnnnnnnnnnnnnnnnnnnnnnnnnnnnnnnnnnnnnnnnnnnnnnnnnnnnnnnnnnnnnnnnnnnnnnnnnnnnnnnnnnnnnnnnnnnnnnnnnnnnnnnnnnnnnnnnnnnnnnnnnnnnnnnnnnnnnnnnnnnnnnnnnnnnnnnnnnnnnnnnnnnnnnnnnnnnnnnnnnnnnnnnnnnnnnnnnnnnnnnnnnnnnnnnnnnnnnnnnnnnnnnnnnnnnnnnnnnnnnnnnnnnnnnnnnnnnnnnnnnnnnnnnnnnnnnnnnnnnnnnnnnnnnnnnnnnnnnnnnnnnnnnnnnnnnnnnnnnnnnnnnnnnnnnnnnnnnnnnnnnnnnnnnnnnnnnnnnnnnnnnnnnnnnnnnnnnnnnnnnnnnnnnnnnnnnnnnnnnnnnnnnnnnnnnnnnnnnnnnnnnnnnnnnnnnnnnnnnnnnnnnnnnnnnnnnnnnnnnnnnnnnnnnnnnnnnnnnnnnnnnnnnnnnnnnnnnnnnnnnnnnnnnnnnnnnnnnnnnnnnnnnnnnnnnnnnnnnnnnnnnnnnnnnnnnnnnnnnnnnnnnnnnnnnnnnnnnnnnnnnnnnnnnnnnnnnnnnnnnnnnnnnnnnnnnnnnnnnnnnnnnnnnnnnnnnnnnnnnnnnnnnnnnnnnnnnnnnnnnnnnnnnnnnnnnnnnnnnnnnnnnnnnnnnnnnnnnnnnnnnnnnnnnnnnnnnnnnnnnnnnnnnnnnnnnnnnnnnnnnnnnnnnnnnnnnnnnnnnnnnnnnnnnnnnnnnnnnnnnnnnnnnnnnnnnnnnnnnnnnnnnnnnnnnnnnnnnnnnnnnnnnnnnnnnnnnnnnnnnnnnnnnnnnnnnnnnnnnnnnnnnnnnnnnnnnnnnnnnnnnnnnnnnnnnnnnnnnnnnnnnnnnnnnnnnnnnnnnnnnnnnnnnnnnnnnnnnnnnnnnnnnnnnnnnnnnnnnnnnnnnnnnnnnnnnnnnnnnnnnnnnnnnnnnnnnnnnnnnnnnnnnnnnnnnnnnnnnnnnnnnnnnnnnnnnnnnnnnnnnnnnnnnnnnnnnnnnnnnnnnnnnnnnnnnnnnnnnnnnnnnnnnnnnnnnnnnnnnnnnnnnnnnnnnnnnnnnnnnnnnnnnnnnnnnnnnnnnnnnnnnnnnnnnnnnnnnnnnnnnnnnnnnnnnnnnnnnnnnnnnnnnnnnnnnnnnnnnnnnnnnnnnnnnnnnnnnnnnnnnnnnnnnnnnnnnnnnnnnnnnnnnnnnnnnnnnnnnnnnnnnnnnnnnnnnnnnnnnnnnnnnnnnnnnnnnnnnnnnnnnnnnnnnnnnnnnnnnnnnnnnnnnnnnnnnnnnnnnnnnnnnnnnnnnnnnnnnnnnnnnnnnnnnnnnnnnnnnnnnnnnnnnnnnnnnnnnnnnnnnnnnnnnnnnnnnnnnnnnnnnnnnnnnnnnnnnnnnnnnnnnnnnnnnnnnnnnnnnnnnnnnnnnnnnnnnnnnnnnnnnnnnnnnnnnnnnnnnnnnnnnnnnnnnnnnnnnnnnnnnnnnnnnnnnnnnnnnnnnnnnnnnnnnnnnnnnnnnnnnnnnnnnnnnnnnnnnnnnnnnnnnnnnnnnnnnnnnnnnnnnnnnnnnnnnnnnnnnnnnnnnnnnnnnnnnnnnnnnnnnnnnnnnnnnnnnnnnnnnnnnnnnnnnnnnnnnnnnnnnnnnnnnnnnnnnnnnnnnnnnnnnnnnnnnnnnnnnnnnnnnnnnnnnnnnnnnnnnnntatcttaagtttatagtaggctgtatatacttctatataacgatttgggtttataaagatagtacagaggtagacaataatatcttctacatcggtatataggttatttaaggtcgcgcttattcttagggtaatatatagctatactttacctttatatcggctttatatatatagtttctagtagactagtaacaggtaatagtcggcattcgctttaagcttctatctaataactgtttcctatatttcgaaacggacttcctttctatcctttaatattagtatattaggtatcttcgtagacttctaactagtgattcctataatcagtatatcactttaggtttagttcattttactctaagtaagaataaggtaataggtaaggtcgttatacttatatatagcgatatctctataggcagtagccttattacattcttcggtagcttagttatattctattataagacgatctttctctatatagagtcgatcacattcttctataagtcgatcacattcttttataatttatctaatagcttccttagaccttccgttctctaagattaagacctagatttcgttatatatcatccggttattatcttcgactgtttagaactaattagctagcttaaggaatcgttccttactaggagttgtatatataatctcacagatagaaggagtcgaaggaccctccttagggctatcgcgtttaatactctcaattaggtcctatattttagtaggagttggggtttcagggttagtagcttcttctgtaagacaatctagtactataggttattttcccttaccgatcgcagcgatccgttatagtaggactataactagtcctattctagttagtttcgggataggtagggtgaaaccggactaggacaaatcgtaataattatccgtatagtcgtacagcttcagaagtttaggtttagggtgatacttgatattatattatataccagattccttttaacaaaagaagtgtatttctaatcgaatatcaagtatagaaaaggaaaagaaaagaaataaacgtgaaaacaataaataggcttttatacccctttaggggtaaagccctattctcgtttcccctagaaggaaggtgcgactgcctatgtaaacgactaacagtacaatcctaaacgggaaagtacgagtcccgcaagtgccaatcgtgacactaattatctaaaaggccgttaaaccaagatttaataaagactttacctttaaaaatcatatatagaggaagcgcctaccctactgtatttatacatttaattatgacggaaaaacggtggtaaggcgagtgtattttgtggcagaaaaatcttaataaattctctaactctctaaaactgacaatagtcctaaaacatgacaatctgatggacaacttagtaatcaaaacaaacaaaacaannnnnnnnnnnnnnnnnnnnnnnnnnnnnnnnnnnnnnnnnnnnnnnnnnnnnnnnnnnnnnnnnnnnnnnnnnnnnnnnnnnnnnnnnnnnnnnnnnnnnnnnnnnnnnnnnnnnnnnnnnnnnnnnnnnnnnnnnnnnnnnnnnnnnnnnnnnnnnnnnnnnnnnnnnnnnnnnnnnnnnnnnnnnnnnnnnnnnnnnnnnnnnnnnnnnnnnnnnnnnnnnnnnnnnnnnnnnnnnnnnnnnnnnnnnnnnnnnnnnnnnnnnnnnnnnnnnnnnnnnnnnnnnnnnnnnnnnnnnnnnnnnnnnnnnnnnnnnnnnnnnnnnnnnnnnnnnnnnnnnnnnnnnnnnnnnnnnnnnnnnnnnnnnnnnnnnnnnnnnnnnnnnnnnnnnnnnnnnnnnnnnnnnnnnnnnnnnnnnnnnnnnnnnnnnnnnnnnnnnnnnnnnnnnnnnnnnnnnnnnnnnnnnnnnnnnnnnnnnnnnnnnnnnnnnnnnnnnnnnnnnnnnnnnnnnnnnnnnnnnnnnnnnnnnnnnnnnnnnnnnnnnnnnnnnnnnnnnnnnnnnnnnnnnnnnnnnnnnnnnnnnnnnnnnnnnnnnnnnnnnnnnnnnnnnnnnnnnnnnnnnnnnnnnnnnnnnnnnnnnnnnnnnnnnnnnnnnnnnnnnnnnnnnnnnnnnnnnnnnnnnnnnnnnnnnnnnnnnnnnnnnnnnnnnnnnnnnnnnnnnnnnnnnnnnnnnnnnnnnnnnnnnnnnnnnnnnnnnnnnnnnnnnnnnnnnnnnnnnnnnnnnnnnnnnnnnnnnnnnnnnnnnnnnnnnnnnnnnnnnnnnnnnnnnnnnnnnnnnnnnnnnnnnnnnnnnnnnnnnnnnnnnnnnnnnnnnnnnnnnnnnnnnnnnnnnnnnnnnnnnnnnnnnnnnnnnnnnnnnnnnnnnnnnnnnnnnnnnnnnnnnnnnnnnnnnnnnnnnnnnnnnnnnnnnnnnnnnnnnnnnnnnnnnnnnnnnnnnnnnnnnnnnnnnnnnnnnnnnnnnnnnnnnnnnnnnnnnnnnnnnnnnnnnnnnnnnnnnnnnnnnnnnnnnnnnnnnnnnnnnnnnnnnnnnnnnnnnnnnnnnnnnnnnnnnnnnnnnnnnnnnnnnnnnnnnnnnnnnnnnnnnnnnnnnnnnnnnnnnnnnnnnnnnnnnnnnnnnnnnnnnnnnnnnnnnnnnnnnnnnnnnnnnnnnnnnnnnnnnnnnnnnnnnnnnnnnnnnnnnnnnnnnnnnnnnnnnnnnnnnnnnnnnnnnnnnnnnnnnnnnnnnnnnnnnnnnnnnnnnnnnnnnnnnnnnnnnnnnnnnnnnnnnnnnnnnnnnnnnnnnnnnnnnnnnnnnnnnnnnnnnnnnnnnnnnnnnnnnnnnnnnnnnnnnnnnnnnnnnnnnnnnnnnnnnnnnnnnnnnnnnnnnnnnnnnnnnnnnnnnnnnnnnnnnnnnnnnnnnnnnnnnnnnnnnnnnnnnnnnnnnnnnnnnnnnnnnnnnnnnnnnnnnnnnnnnnnnnnnnnnnnnnnnnnnnnnnnnnnnnnnnnnnnnnnnnnnnnnnnnnnnnnnnnnnnnnnnnnnnnnnnnnnnnnnnnnnnnnnnnnnnnnnnnnnnnnnnnnnnnnnnnnnnnnnnnnnnnnnnnnnnnnnnnnnnnnnnnnnnnnnnnnnnnnnnnnnnnnnnnnnnnnnnnnnnnnnnnnnnnnnnnnnnnnnnnnnnnnnnnnnnnnnnnnnnnnnnnnnnnnnnnnnnnnnnnnnnnnnnnnnnnnnnnnnnnnnnnnnnnnnnnnnnnnnnnnnnnnnnnnnnnnnnnnnnnnnnnnnnnnnnnnnnnnnnnnnnnnnnnnnnnnnnnnnnnnnnnnnnnnnnnnnnnnnnnnnnnnnnnnnnnnnnnnnnnnnnnnnnnnnnnnnnnnnnnnnnnnnnnnnnnnnnnnnnnnnnnnnnnnnnnnnnnnnnnnnnnnnnnnnnnnnnnnnnnnnnnnnnnnnnnnnnnnnnnnnnnnnnnnnnnnnnnnnnnnnnnnnnnnnnnnnnnnnnnnnnnnnnnnnnnnnnnnnnnnnnnnnnnnnnnnnnnnnnnnnnnnnnnnnnnnnnnnnnnnnnnnnnnnnnnnnnnnnnnnnnnnnnnnnnnnnnnnnnnnnnnnnnnnnnnnnnnnnnnnnnnnnnnnnnnnnnnnnnnnnnnnnnnnnnnnnnnnnnnnnnnnnnnnnnnnnnnnnnnnnnnnnnnnnnnnnnnnnnnnnnnnnnnnnnnnnnnnnnnnnnnnnnnnnnnnnnnnnnnnnnnnnnnnnnnnnnnnnnnnnnnnnnnnnnnnnnnnnnnnnnnnnnnnnnnnnnnnnnnnnnnnnnnnnnnnnnnnnnnnnnnnnnnnnnnnnnnnnnnnnnnnnnnnnnnnnnnnnnnnnnnnnnnnnnnnnnnnnnnnnnnnnnnnnnnnnnnnnnnnnnnnnnnnnnnnnnnnnnnnnnnnnnnnnnnnnnnnnnnnnnnnnnnnnnnnnnnnnnnnnnnnnnnnnnnnnnnnnnnnnnnnnnnnnnnnnnnnnnnnnnnnnnnnnnnnnnnnnnnnnnnnnnnnnnnnnnnnnnnnnnnnnnnnnnnnnnnnnnnnnnnnnnnnnnnnnnnnnnnnnnnnnnnnnnnnnnnnnnnnnnnnnnnnnnnnnnnnnnnnnnnnnnnnnnnnnnnnnnnnnnnnnnnnnnnnnnnnnnnnnnnnnnnnnnnnnnnnnnnnnnnnnnnnnnnnnnnnnnnnnnnnnnnnnnnnnnnnnnnnnnnnnnnnnnnnnnnnnnnnnnnnnnnnnnnnnnnnnnnnnnnnnnnnnnnnnnnnnnnnnnnnnnnnnnnnnnnnnnnnnnnnnnnnnnnnnnnnnnnnnnnnnnnnnnnnnnnnnnnnnnnnnnnnnnnnnnnnnnnnnnnnnnnnnnnnnnnnnnnnnnnnnnnnnnnnnnnnnnnnnnnnnnnnnnnnnnnnnnnnnnnnnnnnnnnnnnnnnnnnnnnnnnnnnnnnnnnnnnnnnnnnnnnnnnnnnnnnnnnnnnnnnnnnnnnnnnnnnnnnnnnnnnnnnnnnnnnnnnnnnnnnnnnnnnnnnnnnnnnnnnnnnnnnnnnnnnnnnnnnnnnnnnnnnnnnnnnnnnnnnnnnnnnnnnnnnnnnnnnnnnnnnnnnnnnnnnnnnnnnnnnnnnnnnnnnnnnnnnnnnnnnnnnnnnnnnnnnnnnnnnnnnnnnnnnnnnnnnnnnnnnnnnnnnnnnnnnnnnnnnnnnnnnnnnnnnnnnnnnnnnnnnnnnnnnnnnnnnnnnnnnnnnnnnnnnnnnnnnnnnnnnnnnnnnnnnnnnnnnnnnnnnnnnnnnnnnnnnnnnnnnnnnnnnnnnnnnnnnnnnnnnnnnnnnnnnnnnnnnnnnnnnnnnnnnnnnnnnnnnnnnnnnnnnnnnnnnnnnnnnnnnnnnnnnnnnnnnnnnnnnnnnnnnnnnnnnnnnnnnnnnnnnnnnnnnnnnnnnnnnnnnnnnnnnnnnnnnnnnnnnnnnnnnnnnnnnnnnnnnnnnnnnnnnnnnnnnnnnnnnnnnnnnnnnnnnnnnnnnnnnnnnnnnnnnnnnnnnnnnnnnnnnnnnnnnnnnnnnnnnnnnnnnnnnnnnnnnnnnnnnnnnnnnnnnnnnnnnnnnnnnnnnnnnnnnnnnnnnnnnnnnnnnnnnnnnnnnnnnnnnnnnnnnnnnnnnnnnnnnnnnnnnnnnnnnnnnnnnnnnnnnnnnnnnnnnnnnnnnnnnnnnnnnnnnnnnnnnnnnnnnnnnnnnnnnnnnnnnnnnnnnnnnnnnnnnnnnnnnnnnnnnnnnnnnnnnnnnnnnnnnnnnnnnnnnnnnnnnnnnnnnnnnnnnnnnnnnnnnnnnnnnnnnnnnnnnnnnnnnnnnnnnnnnnnnnnnnnnnnnnnnnnnnnnnnnnnnnnnnnnnnnnnnnnnnnnnnnnnnnnnnnnnnnnnnnnnnnnnnnnnnnnnnnnnnnnnnnnnnnnnnnnnnnnnnnnnnnnnnnnnnnnnnnnnnnnnnnnnnnnnnnnnnnnnnnnnnnnnnnnnnnnnnnnnnnnnnnnnnnnnnnnnnnnnnnnnnnnnnnnnnnnnnnnnnnnnnnnnnnnnnnnnnnnnnnnnnnnnnnnnnnnnnnnnnnnnnnnnnnnnnnnnnnnnnnnnnnnnnnnnnnnnnnnnnnnnnnnnnnnnnnnnnnnnnnnnnnnnnnnnnnnnnnnnnnnnnnnnnnnnnnnnnnnnnnnnnnnnnnnnnnnnnnnnnnnnnnnnnnnnnnnnnnnnnnnnnnnnnnnnnnnnnnnnnnnnnnnnnnnnnnnnnnnnnnnnnnnnnnnnnnnnnnnnnnnnnnnnnnnnnnnnnnnnnnnnnnnnnnnnnnnnnnnnnnnnnnnnnnnnnnnnnnnnnnnnnnnnnnnnnnnnnnnnnnnnnnnnnnnnnnnnnnnnnnnnnnnnnnnnnnnnnnnnnnnnnnnnnnnnnnnnnnnnnnnnnnnnnnnnnnnnnnnnnnnnnnnnnnnnnnnnnnnnnnnnnnnnnnnnnnnnnnnnnnnnnnnnnnnnnnnnnnnnnnnnnnnnnnnnnnnnnnnnnnnnnnnnnnnnnnnnnnnnnnnnnnnnnnnnnnnnnnnnnnnnnnnnnnnnnnnnnnnnnnnnnnnnnnnnnnnnnnnnnnnnnnnnnnnnnnnnnnnnnnnnnnnnnnnnnnnnnnnnnnnnnnnnnnnnnnnnnnnnnnnnnnnnnnnnnnnnnnnnnnnnnnnnnnnnnnnnnnnnnnnnnnnnnnnnnnnnnnnnnnnnnnnnnnnnnnnnnnnnnnnnnnnnnnnnnnnnnnnnnnnnnnnnnnnnnnnnnnnnnnnnnnnnnnnnnnnnnnnnnnnnnnnnnnnnnnnnnnnnnnnnnnnnnnnnnnnnnnnnnnnnnnnnnnnnnnnnnnnnnnnnnnnnnnnnnnnnnnnnnnnnnnnnnnnnnnnnnnnnnnnnnnnnnnnnnnnnnnnnnnnnnnnnnnnnnnnnnnnnnnnnnnnnnnnnnnnnnnnnnnnnnnnnnnnnnnnnnnnnnnnnnnnnnnnnnnnnnnnnnnnnnnnnnnnnnnnnnnnnnnnnnnnnnnnnnnnnnnnnnnnnnnnnnnnnnnnnnnnnnnnnnnnnnnnnnnnnnnnnnnnnnnnnnnnnnnnnnnnnnnnnnnnnnnnnnnnnnnnnnnnnnnnnnnnnnnnnnnnnnnnnnnnnnnnnnnnnnnnnnnnnnnnnnnnnnnnnnnnnnnnnnnnnnnnnnnnnnnnnnnnnnnnnnnnnnnnnnnnnnnnnnnnnnnnnnnnnnnnnnnnnnnnnnnnnnnnnnnnnnnnnnnnnnnnnnnnnnnnnnnnnnnnnnnnnnnnnnnnnnnnnnnnnnnnnnnnnnnnnnnnnnnnnnnnnnnnnnnnnnnnnnnnnnnnnnnnnnnnnnnnnnnnnnnnnnnnnnnnnnnnnnnnnnnnnnnnnnnnnnnnnnnnnnnnnnnnnnnnnnnnnnnnnnnnnnnnnnnnnnnnnnnnnnnnnnnnnnnnnnnnnnnnnnnnnnnnnnnnnnnnnnnnnnnnnnnnnnnnnnnnnnnnnnnnnnnnnnnnnnnnnnnnnnnnnnnnnnnnnnnnnnnnnnnnnnnnnnnnnnnnnnnnnnnnnnnnnnnnnnnnnnnnnnnnnnnnnnnnnnnnnnnnnnnnnnnnnnnnnnnnnnnnnnnnnnnnnnnnnnnnnnnnnnnnnnnnnnnnnnnnnnnnnnnnnnnnnnnnnnnnnnnnnnnnnnnnnnnnnnnnnnnnnnnnnnnnnnnnnnnnnnnnnnnnnnnnnnnnnnnnnnnnnnnnnnnnnnnnnnnnnnnnnnnnnnnnnnnnnnnnnnnnnnnnnnnnnnnnnnnnnnnnnnnnnnnnnnnnnnnnnnnnnnnnnnnnnnnnnnnnnnnnnnnnnnnnnnnnnnnnnnnnnnnnnnnnnnnnnnnnnnnnnnnnnnnnnnnnnnnnnnnnnnnnnnnnnnnnnnnnnnnnnnnnnnnnnnnnnnnnnnnnnnnnnnnnnnnnnnnnnnnnnnnnnnnnnnnnnnnnnnnnnnnnnnnnnnnnnnnnnnnnnnnnnnnnnnnnnnnnnnnnnnnnnnnnnnnnnnnnnnnnnnnnnnnnnnnnnnnnnnnnnnnnnnnnnnnnnnnnnnnnnnnnnnnnnnnnnnnnnnnnnnnnnnnnnnnnnnnnnnnnnnnnnnnnnnnnnnnnnnnnnnnnnnnnnnnnnnnnnnnnnnnnnnnnnnnnnnnnnnnnnnnnnnnnnnnnnnnnnnnnnnnnnnnnnnnnnnnnnnnnnnnnnnnnnnnnnnnnnnnnnnnnnnnnnnnnnnnnnnnnnnnnnnnnnnnnnnnnnnnnnnnnnnnnnnnnnnnnnnnnnnnnnnnnnnnnnnnnnnnnnnnnnnnnnnnnnnnnnnnnnnnnnnnnnnnnnnnnnnnnnnnnnnnnnnnnnnnnnntagatttataataggattaactataatagtaaaggttataataagaagtaaatactacggttagagatcacttttataacctagaaatcgtaagtaggtaactataattaaatatataaacttagtaagataggccctccctctatatattatttttaaaggtaaggtcttccttaaattatagtttaaaggccttcctagtaactagtactttaaagttagtctaaataagtagatattagataaaataagcctttattagctataaaagctctttattctaactacttcttcttatataaagggagtatatcgacttttagtacttaatagctatagaagctatttaaccctaaaattcgataagatttataagaaaaataagattataccaatttatatactactacatttatcttaccttttataatcccttaatatcagttattttacagtagtaaaacggtcgtatagccggttagttaagataaaaatatagactaggattaactatattaataaacttaagttcctagaagtatacccctctatataaattaaagctttgaaattagagacaattaaaaatagcttcttagcagctagtttaataccttttttacctaatcaggtactttcaaaacttaatatttatctttgaatactaaccccccctcctagtagggatagcgatttaagctagaattttaccctaaaaaccccttttaatagcaaagatctacatcgataggcttcgttaatcaaagctttacttcgtacctaatctcgaagcctaataagcccttctaagtgtacattagatcaacttgtcaaaggctgccagattgcaatatatagtgctattctactagcaaaagaaaacaaggatttacaggatgaaaataagaataagaagcaaaagcgggccagatctagacggcagatacctaccgaagaaggcctctcagttcaagaagcttctgaaataattgctggactggtagaagcatcagaaatacccctacaccccccggacggaagcacttaatcagggttggaaccacgaccacgggctgcaccaaggtgtagtgggtgtggaaagatagggcataagatcaataggtgttcagataaatgatcctttttagtttaattaatttaatggcgttttggttgaaatatattccttagaaaactatactcttgggtagggtggcggctcgcttacagtggcggctcgcttaccgattacgttactccggattaattgcttagataataccatagttaagccttggaagctcccgagtctggagaagtctccctaattaggcctagtcccaacttatactcgctaattctgctaattctattggcttgattcttataccgtcttttagaattctgccggtctaagtatgattacataatgcaaaatgaagccttacgtaaccaacaatgccaagacttagttacaaggcttgtagcttcttcgactgtccaatgtagatcccgctgtcatgacgacatatactaaacttcagtgttatacatagcattatgattgaacttattggtagaaaatagagcattccaatcaaactaaggcactatacacgcaagccaacgcgttccaggaacgagcgaagtcaataaatcttagaatcctgcttagggttggtgacagcatcacgtgcagagcctccgaggccatgacgtcttcctcgaacctgaaaaacttccccataagaccacctcgtctcttaatcctcccgagcttcaattgcttcccctctttggtccaaagaatctctattgctttagtctttctgtgtttgttgcttgtttactacagaattgctgcttctcgcatttgtttaccttcacccctcagctgtctttctgaagctctcaacaccccgccccttcgattaatccagaaactcgattttataagtgtcgctgattgacaacacacagcacaatgactctctactactcccttgtaagcctgacaagttccttctctagttgcttcttgttgtgtttctcaagaagttctcgagaatcgttgcagcctgatgcccgaaactgtctacccagcccaagcgtctccaccctatcgatgaactaacacaatgccctcatataggtattcctccttctggtgttcgagatgggtgtattcctggccctcgtcatccctctccctcatgtcgttaagcgcaagctgtttgccttcatctcggagagcccgatcatagccaaattacaatatggattgaaggtatattgccaatttgaaaccacgtttccggttacactgctaaactggcctccagattacattcatcttcatcctcattctgttcatcgactccgtgaaccgtgtgtaccgtgtgcagcaggagctgtccgccttcgccaaggacggtcccggcatggggtaagtaatcaatcctcaggcattctagcaaaatttctaaccattgttaccaacagagccgcccacctcggtaccgaccgcatggaggtccaggcccgcaagttctactcgcagcgcaacatgtatctctgtggattcactctgttcctctccctgatcctcaaccgcacctataccatgattctcgagactctccgtcttgaggaccgcgtccgtctcatcgagggcgacaagaaggccggtggaaaggactcagcccgtatcgcggaggctggttcagtcggcgagatcggtcgtcttaaggagatcattgccaccaaggaccgggatattgagactctcaagaagcagtgtgagggtctgacccgcgagtaccacagcctgggtgaccagatttccaacgaaaagggtgataagaacgagaaggttaagaaagacctgtaaaagggttgcattgttcgattccaccggacccagactgtcgaagcccaagctttgatagactttcactcgcgcacctttacgtttgcgttggattgagggtctcattccctgtcaagggagttggaaccctctctgcaacaaaatcacttgatacattatggattaagtattgtgcgtaactaccctttctcgatgtatggactctactattatgtagagggagatgtgggaattgcaattggttcctatcgctgtattcctttccatgtactagcaaatatcttctaaggtttttcggtgggatccatagtgctgattctgtagcacttgtcatattcaatcaatattaccctttcatattcaattgtctattgatccccgtcatagccgcgagtgtccagtgcatcaaaagctaaggaccagaccaagaattgtcatgtctagagatcgtaaattacatagtatgtataagaaccagccgatcacggctgtggcatatagaaatatcaaaccaggaaggtccaaaagctcggatataccagctcctcttcaaagatccttcggacctgcgcgagcacaaaccgctcaaccttcccaacattcttcaatacctgcttcccatcttccttgcgaccaatctcactatccacccggatctcctgcaacaacccaccctgccgcttcagatccttctccttttgatcgcccccagaccgaggccgaccatcatcactgggattttgactactctgagactgttcagatccaagcagggcatctgcgtcttcaggagaaagaaaacagaaatgtacccgcttgcggatatacgcaacaacggcaacaccgtcaaacgtgatgcctgtgacattcaacttcaacggcagacccacaaagctgggcatcgggtagtcaagcaggatctccgcggtcagagacatgcgcacgtcgccagcatacttagcatggcacagcacctggaagtcctccgggcggcgctcgcgcatgcgcggcgggatggggaacgattgatgctcggcggccgggtcgtctgatatctctattgagggttgcggcgcgtcggttgggtcgcttgtatgcggatttgacccactgctgccggtgtggccaagggagggatgggatgagagtgtatttgcggttaagggacgggagccggaattggtggtgcccaggtctggctctgcgaggtgatgtgtaccagcagggcgggctgcttgggacctgggtccggcacccatacctgagtctgaccatccgctcgcaaatggagtgccgcctgctacggcagcaaggggtgtctggtttcctgatagaccgcctagagaccgcatgtggtatcccaatgttgacgtaccgccgggaatcccaggtgtactggcgcgcggcatgaaatgcggattaaggtgatcgcctagtggggatcgaagcgcggatggctggaagccttcgccagggtatggatggtgactgaaattatgaaggctgtgcgcggtgggattgaaggtcatgtcgtcttcgtatggggattcgtggagctcggacatgagctcctctgaggtggaggtgtcggcatcgtcatcgtcttcctcgtagaaatctgcgaacggttcgcaaaagtctttgatctcgagatctggcgcgatggtcccgaaatcgaaggagtgaacctgaaccgagcgaataaagcgcggtagggtgatctcctggaacttttcgtgtacgaacgaccggattcgctctgctagggcttccccgtccgggccggaggtggcagctgcccagtcgacttcgattgacatcacatatgcaatgctatagcacttgatgcttgtacatatcaggggagatggaggacctcgggagcccgtgacggtatcaccacgtgatatacggagtacatgatgacattccggccagttccatcgataccaactacatccgaagcagtgattgacgaagtgctaggaaatataatatattcactgtgcgctcactaattactacctaagagggttaatatccatcctcctctctggatacactcataccaataacttcaaaacattctcccatccaccgtagagccggatgtaagcacatttcattcacaaatcatatgcagacgctttccatcctttccgtcctttccatcctttccatccgataattctgtctgatccgattttctcttcatgggtcgggactgttttgataatggccggggatctaacttagacttgtgaaagtcaatgatcaatactcggttaagttcagggttccaaaggatattgggatcccgaagatccccgtgagtaaccctcagcttgcggatttcctttttcgaccggtgaatctcccggcgaagcgacgaggtcatttccatatgcactatgttctcacctccccagcccataatgagcatgtgagaaatgtctcccgcatcatggtagtagtccaccaacaggtcgatagtaccgaggaaaacgggtactgcggacccttggactttgcgaagaatctggtaaatttctgcttcccgggagacttccttccaaagtcccgaagttgttccttttccaacgaccgtatagccataggcggtacatgtaagtttgaatggcgcaccatatgacccacatgttccgaaaggcgtacagtctttgtcacggttctcgcctagttggattttcaataaacgcactagatctcctgcattgataggatgtttaaggtcatttggactttgtcgatgaagtgacacgtttgggcaatgctcgtctaaagtaccgccagtctgtagcccgagtaaacaccgctgagtgcaaaattgcgcatcgtggcgatatgactggcctcttcggtcgtttctaggctcttgccgagtagacggggaggatgtgacttgactgatgcggcgctttcgtctttcttggttcgtatcggaacctgatgagtttggcgactccgcacggtgtcggtcatccgttggtgcacacccggcagattgagggcctgtagacgacgaccgacgaccttcttccgtaggggcattagattgaggagaggaaccagattgaggcgacgggtgatagtcggtactggagtccggatccgtaacctcagagtggaaactactttcacaggatcgagagatttgctgtaattcttccttgggaatctcagaaagagtatggtcgaagttggttttccaagtacggagcaccgaccgcgcattagatttccatatctgatcacgcacaggggaccggaatgccatcagacaaagacatagtacatgggcaattgaggtattcggatattgaaaattcggttcgctttttctgttgggatcacagaaaaagtagtgcaatgtactagggtcgtcgtatggaacgcggagaaggacacgcgcaatcccgttcgtcacataggaatattcgagtcctttctgaatcatcacatggtattcctggacaatagcggagcaggcgagtcgctcagcattgtacctagcctttccatcgacgtcgttagggattgtgttagtatagactattttctcccataagttcattggtcgaagccctaaacgaagagtttccaccgaaagcttatgggggggtttatattcaaccgtcgtgaggatgctttgggtgtttccatcaatacgacggatccaaaacttatcgggtattggattgggtatgctcgagggctgacttgtatccgccctaacagcttcggcgttcaaagcatttatatgagagctgaactcgattccatcaccaagcccgaactcctctcgagcaagaggaagtttgctcaataccgtgattatatcattgactggatattccacagcgtactgctcgtaattctctatgcccttctcgctatcgatcggcttgctagtaaggcgactttgatatccttcaatctggttcagagaagggaaggcccgcagcgaatcctccgattgtaggtacccacacacagcggagtagagcgcttgctgttgagctggacaatcaacccacaattcgagccgtgtcgggcaaaactttccagtgggggcgggtatttgacctgtggtcgatacggatagttccccgactctcaatggaagggagagtagggagtggcaagagcgcaggagttccatgaaagtggtcggtcgagtgcgctctttttcctttcttgcctcgcctgtagagtgcgctcttctgcctgtcgaatgcgctcttttccctttcttgcgtcctcgtctgcctttcttattttctcctcgagctctaggatgcgagaattgacatccgaaaagctattgctggccatcgtttagcccaagggatattaaaaatagctaacagctttgaaggttgctgggaaaataggttgctggaaggaaagggctggggatatgttagaacacggctcccggcaaaggtatatttccgactcagccaaccagctcggtggttgcctagatggcgttttcactcggcagaaaattgagcaaaaagacaccttagaaatacggctttagcaacgttcaggaagggatatgaagctggataatataaacaattgaggggtaaatggagaggcggtgaattacgccatgacccacagtttgaggctctgtacggcaggttttttgggtccatcgcgccaacctatacaagcccttagaagcataagattatttctgatctttctatcggtctttctatctgtttttttgaggtcttttttgatgtcttttagaatgcagccgctaaccaatagtaggggacctttgtgtcagatcaatctgaagaagagctatataagaaggctgcttcccactcttgcacttacttcttctttccttcttcatcttatctgacggttgtatggtttgttcagtcaaaccatgcatatgaggattttactcgcttgtcatttatggaaggaatgattccttccacatacggcaagagagtcacacactctgccctattggagtcagtgaggaccaaacagagatgcaaattgcgtttcattagctgcctcccagggggtgaacctataccaggatctaacgtaccgacctcgtgagacccgcagttgggatgtttgcgctgtacaagatggaacctctcccgaaggtggtacagcatggtgacgaaaatcccggaaagctatggtctacaccacctggtcgacaagaccattgagagacccgatcgtgacgccgcaaacgcagaaacttgaatgaaattaagtatgcaagtaaacacctgcttgcgactctgcatcgaccctaagatctttgtcgctggttgcatagctgttcggacgtgacctcctggtctgctcccaacatcacttttccggatatgttttcacggtgaagaccgacaataagtataaacggccactactttctaaggaacctttggaactgaggtggcacctgtctcgcattgcttgtatgcagggcagatgcgagaacgaagatccctggtggttagccatctcgtcatattattgctgcacatttgttcagttatatacacggacaagcaacaatggatgctatttttagaaaaggaagtgacatattttcttcttgccactagaaagtttcgcccgacgcgactcgaattgtggttgattgtccagctcaacagcatgctctactccgctgtgtgtgggtacctacaatcggaggattcgctgcgggccttctcttctctgagccagacagaaggatatcagcaacgccttactagctagccgatcgatagtgagaacggcatagagcattacgagccttaagctactactcggtaagtatcaagacaaagcggacttatcgacaatttgtgcaagcttgtggatcattgagggtcaagagactgttccatagcctatggatttctacaaaaatatatatatttcccttttgcttgatattgctgtgttatattggatattggaattacatacatcggccactataccagccattgagataaaattgtgtggcaatacaaaaagattttcataaaaccaggacagcatgatatactgcatatcaaaacacagctttgtggtctctcaatttgtccacaagatggtattgtctaaggagaggaagatccgagaacgcgtagatagacatatcaacacagagaaccaccggcaaacaatgacagaaaggacataaaaagtcaaacgacagcccgaaattccagaatgaccgatgtgaggcaacaaatgagatagcctccaaatagtagatgtgacacagtgatatcttcttcttccctgaagcagacatagacagggcggggaagccaatcactcgatgacagtctagaacatagcaacagacggcctcgagtctccgagtcatttggtatctatagtatctcgtcagtcaaacttcttgctggcaacagccgtctcaaaatatggaaggtgcaactcacgtcagaagccaatttaaccaccgtgacgagggcaattggagtttactcgtgtacgagtctgttccttgacacctggacagccaggagtgccttgatgggcacatgggactatgccatcttcttggtgcgtgcacccgcaggcgtactgaaagatgtagatggaacacatattgagggttgagtgaagaggtgaagttgtagaggatatataagcagatattgtgaattgaagaccacttagtttgaatgaggccttgaacttttgatattggttgatgtgatgagaagcaattagaggatcaaagcccggctttatagtattcgatggctacctcaagcgaagtgaatggcctgcgcaactcaatagagaaaagaagctaggaaattatcgacagtcgcaaaaatggttcggtccttcagtcaccttgcacaagcgctgtaactcattcaactagatgcgccatatgcagccagtgactcaatgatcacttgttgcgcagtcaaagagaaggtgacggtaggcacggaaatagtatacacatgcgccatatccagggcgtatacatttaccaacagaaagtagagtttgtggtaggtggaccgttagagtgtggcgtaccattggggagagtcaagatattcgatggggttcgctagtagcagcaaaccctaagcatgactaccgatgcaaattctaaatcccgcaggctgcaagaagcacttgacatcactctaaaagcgctgcagccagtgttagggcgtatgttctgagcgccaacagggacccctctcccgatggcaccccatagggcaatgctgcggttgaagcgttgatcaggaacatggtttgccccatctaagaaacctctatgatcctgatgtctaaccttaaagccatcgctcatactccgagaaaggcaactgccacagcttttttatgagcctcaccgtaggcggcgcaggaggtgtgaccaattggatgatacctgtgagattacagtgactcttctcgaattctgtatacttggatattcaatataaccccgggaacccgagtacccgcatagggctctagacacctacgttgttgcaatggactagataggtaggtcctgggagtaatcatcgagagccaacgaaatttaaagaaagcagtcctccaagcaaaactctaccagttcagtctcgatatggcaggagatgacttcattgactctattgcaatgggcttcgacttgtggatataggcgaataaggctcatctctatggcgcagttggtgattaccgcaagttctgcgcgattacaatgcgaaagactgcatggtgacaaggctttttcttaataataatgagttcagcgagtaaaggataagaacaattccagccaagaaaatccggacttgctatggttagtatggccggtgttgccggggtgcgatatcagccaagaggcattctttgtcgaatctagcgcgatcgtgctgtggggcctaggcaaaaataaaccaatactggcctatcagttgattctagagcgctaaagactggcgagaagcaccaagttcctcagccaaggcacagtagcattcatatgggttcgactgaggctctccccttgctgaggcaccgacccaccggaagatttactccgagcgagtagagacgcgcggggctagtggcggcaaggcacagcgcgcaatcgataggtcgagagcagttgctgagcagtctgctttgccgctgttggtttgtaacttttaggcattgcagagagcggagaaaagtaagaacggaaaattacttcaaaggttaatgtttgcattttactgcatgagggttttaccacgtgaggagtgtttccaaggttcagattcaaggttaaataaacatgggggaggaaccatggaaatgaaaaatctaatctgtttcttatctgtttgaaatactagcctaggagatccgcttgaaacaatttgcttctcacatggagtaagtgatatccccgagtgacgactactcgaatctagactgttgacgatatctcgacgcgattcttggaacattggaatatgatgtcacatttgtgtctttcttcctgcaaagagtagcgaaattatcgctatcagggcccctaagagaaaagaccggggagatcaaaataccccagcatagccggtggcccaagcgcccatgcagcggttggaatgattggcgaagaggattatcgacgagataattcggaatgcgtaaggatttccacccgagaccattattaacaacacatacaggataggtgtggaggcatacgggagcctgtggaagccatgagttttcgtgtgtcggccccacatcctggctgttgatcttccgaggtccttgagtttcggctggcaacggcatatcgcgcgatgacgcttatacatattcgccatggctgctgggaatgactgtcagccgcccagactctggtgcgactatgccagagccaagagaggcgaggtcgaagcattcagagaaagaaaaggtcaatagtgaactcttggctttgatccccccttttttcggccaagacatgtgaatctccccagcatatttgggattctcctttctgggcttaaacggacgataatggcggggacctcgtatccactcctccgtacatatgatgtgctggatgcgttggatcggcattggatcggcgtgattcgggcttatcattgatacagcatgcccctcattctctacggtcctccctcttggcttatctcagtctggactatataagctaggtcgaaactccctgagatttcccactttcatccaaaacaatccatctaaaactctccttcaatcccgaaatatcccgtcttttaaccgatctacttcttccgcacaaatccttcaaaagttttctcagaatgtacacttacactgccactcaccgtttcttggtcctctccgccactgagtctggcccttactaccccgccaacaagttcctcgtcttgtctcccatcgaatgtggcccggatccccgcgtctgggaagaccagccccaaattgagaccagctcgaacgaggaggacactgtgccggctcctgccaaccgtgcccgcaccaatagctctgtctctaccgactcttcagtctccctcgatgacactgctgccctttcgcccggtttcctctaccttggccatggcaagaagcagcactaggtactctctatcattggccggcctagtggtttggtctcctttttcaatcctatttcgggatatttcaccgtcacagcaactgatccataattgagcttaccatgtgttttcttgttttcttctttcttttgcaatcttgatcaaattgagcgactccaatcgggagctttgggaccaccctatcatgggatagggcaggaaaatcaataggggtgttttttttttcgtggcgctttcaaattgccatatgcttttcattcagaatttgtctacactctcacgtctttcgcctctgggaagcatctgtattgccccattcggccagctagcaatcaatgaacaacagttcaaaccatccgcgtgattcttttccaccccacttttgccgccaaattgtgcacactagttacatagcccacctgactaaaatacaaggttgtacggaatagaggaatccccgtcctgtcggacgctagggagacccctaaatgcttgccaagtgctgccaagatgatgatttcccgccaagccttgtgcaatctgatactcccgccttggctggggtagggattgacggggtcaccgcggacaatgttccacggccaggcaacagtgcccattatatgtcgtggaagtgtatatgggctgcgaatcctgccaagcctccctgtcttactacgatagcttaccagtccacaattattttgttttcttttattgatccctccttgcacgttgattgtttcatggattagattggcttgttcgagttaagaccattcttggcccacaattgccagctcgattttctagtcttcattctttccggtaagacggtctgctcttcccccctttacccctcatcaacttattatttacttccccgcacatttctcattccccaggaagaatgcgggcctacaacatacgatgcactatttagcctactactatatagtttcggttcgaaatttcaagtccccgtgaccaataagacccactaatttcaaccacatgacaggtgttacgcgagatggactgtaaaaaggagaattagccgagtggcttttcaagattcgagttggctagaattaggtacctgtctaggtactcagggcttgggctagcactaaggttctcacgggtcaattgctaatatccctggttctgtgagtaatagatctgtgttactgtgctttacttttagtacccgtttccccccctctagatgctttgtttgcgagcctcgtggggactgcacgtactttattttgaatttgcttaggaaatgtccgatattatccatttatcttatatacattttcagaccgccgactcttaggaaaggggcaatgattgtgttcctccgtctgaggtatttcaagatatagctcgaggactgtatacaacattgtttatctgcttacgcttctaaaattaagagcaacttcccaatgaaagtctgaaattttcattcaattcatgatagtgacatcgtcctcgcagatcaaccgcataggatgcttcggggacttggcccttaatctcatcttaatcgcaacgccctcgttatgagtttgatattcaccgacgttcaagcctcggatgagacacattcttaacctcttcctccagatgatgcttccacttgtcatttcactacaaatatttccacagacaaagcccccgcgaacgggaacagggacgggatccaaaccataccacacatgaatattgatctatcaccgcaatcttcagtaaacttcgcgctgtttggagacctagttgcgcaccaaatatataatatgaatcttgctagctgcgagttccaaaattcggcgcatcaaaagagacttcgcattgccaaccacgagagtttcgtcttctggatactgtaagtaggaaagcgcaggagaatataaattttctataccgacgaccattgcaattacgagttccctacgtacccccacgacatcggggttgtcctcgatgtgcacgtacgccacatcggaaggtatcagactcccgtgaaagtctagagcagggattacgaccatttgaacgatgcgaacagctcagtggactctataccatccgaatgtgcgtccagcacccaacctgccctaccacgatgatatcaaacttgaagaagacggtagtcgaagaatacataatgataaaagttgcgacgcgcgacccgaggcgtcgaaactaattggtctggtatagccaaagagtgagaatgtaggggatgataatgaaatatattctttacaatatagctagctgctccgtacacaaggtacttcagggtcaactaacgatgacggtaatagatacctccctcgcagccggttcccatatataagacttgccattaattagttatttttccattcctaaatggtcttcccaaagtcctccaaggtgataatagcactagttaaatacctggaattcaaatgcgtaagatgtaagttggcgataaatgtaaattccctgggcttgaatacaacttcggatcaatattaatatcgctctagaatatgtcactacagagtttctgtaagagtcatgtcactgtagtgcccatttagagtcatctcataatcttaggacgactcatttttcatgaggaaactgcccatgacccatactcattcataaagctctaattttgtagcaaaacgaaaactatccgtatgattcctatgcactggcaatgccatcatataatcctgctttaaatctttcgattatgtataccatacttgtaaaaaggtggccagcagtcattagtccgctgagacactatagggtcgagaaatcaaatgaccccattttatccgagtctgcatacataaaggacacacattaagacttgatgcttctctgtgcagtaactggaatttagggttgactaaatagtatttgtcggcgtttaggcaaacttcgtatatctgacttgatgttattctcgcaatattgaatgaacgtggagaactgatatatctcgctatatagatcaatctgtatatttaagttgtatgttacacgtcgttgatccaatactactctcaattatcccgtgtcgtgcattttgaaagtgacatgctatttttggctaccgtctctggtgggaacagccaagacaagcggagcaatggatattgaaagattatatcagcctgaatcagactgcagatctagaactataaagtacgacgctgtaatcatgactcaataaaagtggtgcagcgatattataatgcataataccggccagtttttggcctattatgattcctagggttatctagtgagagctgagtacagggaatgagccttgatgcctgtagggtaaaggggacaccatccgccttcgatgtgcgcagcgagtagagtagagacgatgttgttacacttgcaccgtaccgttgtgagacgaatcctacgatatacacctaaaatatcaacgaattacaacataattattggttcagaaatgcggactacaccgacacatacatgaaacacaggagcgatgcttttgggaaggatctcctttttgggtatccgtatataggcggtatagattggctcaactgcgaaatgtctcacttttaattactttggggttgggggtatattactgtacagctcgttctaccccaatacattgtaaataaggaaacaggttgggcttgtgaagtcatcgggaaatgatgatacataatggcctgatccggcaatgttgattactacgcggggtggcgacgaagcccgaaataaacccgaatgaacagaaacggaccttcaattgttagttttagctcaaagtaagaaatgacttagcttctacggggtagttttacccatgttctttatatgtatgttgtacaaagtactaacgggcgatgccgagcctcggaagttcagaatgtttcatcgtgcccggagtacgcgggttttccgctaatatattacttagttagttatgttaccgaggtacgtatttaatgataattaaggtacggagtactccgtatgttgtatggagtattattgttagcctatttctttgagtgtcttttgagggcgctaaggaatggaagctgcccaactgcttctgccgcgtttctagcgccaaagccaagaccccgttgtgttccgactgaatcgccggtcatttaacttatagtttccaagccactactatttccaataaagagatcatagaatggggtaccttaaaatatatactagagtgctatattgttgtagcaacaccagcccccggttattgacacctgctccttcaaggctatgtaatgacgaagtgttaactccgccagatctcttatctgagattgccccttgcagatgaccccggatttagcgtactagtatctgagtttctttggcgcatctatctctcgctttacatctatgttatatagatctaactcacggtcacggtccccagcgaatataggtaggaagtggagaacgtttcttcacaatgaaccagaaaatgactcaataattggcaggaggaagtgttactagctgctccacttacggcggtggtcgggaggacataaaataataatgaatatcattccccgtcggagtacggagtaaacaggtgtccattcgatgtaagtgcgttgctcaacataactcaacaaagtcaacagtattcgactacgctacttatcagagcagatattattcccgttggtccgcaaagttaatatcaccatcatcgactcggccagttagggccagttgcccaggtagtccccgagccaattaaaccacattagtcataagatacagtacactagcccgtttcaggtaatttggtacattaccgatcatcacgctcgcatcctgcaagcggtgtgcacatttgctatatacgctttcaggtagtctagttgttgtttctcgataatttgaccatggtagcccaagatctgtgaattaatccatcaagtgatatagtatgatactatagagagatcattattcggggccagctcggggccaagatccgctaaggaaaccggtcacgtgggtaaataccgtaacagcgcttgtccaaaaccggaagcgttgccatctcataccccgtcttcatgagcccttgcccctgctgttcctcgacttatcactcttcgattgcagtattattctcacttattcaaccctttccctaagtcttcggattattattagaaaaagaagcaaagggacctacactccttcaagtgactcgacgactttctgccaaagcgggacatcatccgagggtggactcctgcgcccaaaaaccgccatccactcaaaactgtcgaggggcaccgactgtttcaaagtcgcattcttattctcttcggattttatctgtgtgagcttcgcgcttcaacgcgggactcgaagaaaccctgttatctataagcctctcggatttggcgtcacatcgcgcaagaccggacagggaactaggatatcgagtcgtcaaacctcgacttggaattcttatttttactactcaaaatttggtatcagcagtttgccacgatgactggtgccatgcctattgatatttcctcccggcaaacgacctcggtgtcgccgccgggtcaacaggcgtccaatctgacttcggcgttgcaaagagcgggcaacggcgagcggacagggagcttttcacatcttcccggcggaggactcggcgtgttcaaggccccaccgcctcgcaaggaatcgatcggcgcaaccacaacacaatgggggaacgggacgaaacctatctcgatgtcgggatctgctcgcgacaaaggtcgccgtgagtcgctcgcagggagcttggtgggtgggatgagctggggtggtgtatccgttggtagttggatacgtgatgagtgagtggcctgtccggacctagaagccgcgggggaaatgcccaccctgtgttgctattgtcgcactgcatcaagagctgaccaagggaaatccccgcagtatcataatgactggcacgtcaccatttaccttccagtcgccatctttccattcctcatcgtatctcccgaagctggaagcgaattttatgcgagactttgcgtgctgcggtgtgacgttaccgacgctccatgacctattacaacactacgaagaagcccatgcgaccaagtcgcccaatcaaggccaccgccagagccagggtgaaaatcgagctgccttggcggctgccgcaatcgcacaacaacagaaccaacagcatggcagccaaggacgtggcctgcagcctgaccgcaccctggatatgcagcgcaagttgggccagaatccgtcaccgttgcagcatgcagacctagacacaatagacgatatggagttggacgacgccctaggagacggagacggctcatcctcgcagatgttctcttctcagctgcgtgagggtggacagggcggatatggtaactccaaccagcagcagttaaatctaagtatgcttccaagccaccaaggatttaacacaccctcgcaacctggtacaccgattggatctggacgacccctttcactgcagaacaatccgactgtttcttcagtcaacacccccaccttgatggccaacccgctccaaaattcgcaattccgaaatacgcccgattcatccggaccagggaccccggccgaaattgacgaaagcatgatgggtgggttcggtgatctcagtatgcaaaataacaccatgggccaaaatcagaatcagtttggccgcttcaatgggaacaataatgatatggtcgatctttgcatcgacgagccggctaagcggctgtttagccccagtggcggtatgggttcgcccaacgcccactttaagctcagtggggctcagtatggcccgaatagcgatattgcacgacggatccgcgaacaacagttgctcgctggggtccccgacactactgttattcttcctaacgaagaacccaagccgttccgatgccctgttatcggctgcgagaaggcatacaagaaccaaaatggactcaaatatcacaaagctgtaagcttgatctccccctacattcgatattatttttctaaccgctcctttttttcagcatggccataataaccaacaactacatgataacgccgatggcacgttttcaattgtcaacccggagacatcagcgccataccccggcactcttggcatggagaaggaaaagccctaccgctgcgaggtgtgcggcaaacgttacaagaatctgaacggactcaagtaccataaatcgcattcaccaccctgcaacccggatttccagcttggaggtcgtaacctcgccctcggcggcggagtcatgcacgggcagaacatcaacgttgctggagctggcctccccggaattggcgaagaaggtcttctatgaacccgtgaacaaatatgtcattatgtcccatacataattcctagctaattgacgcgaacgatctcgacggctttcaggggtgaggcactcctgcacacgatgtcatgattttgaattgggtccggtgactttggagttattccttttctttttctctcttcgaaaattgttccttttggcttacttattgactgtgctttgtgatgccctgcttttgcttttcgttctgctgtccgatagattctactggcatgatggttttacccccacgcttgatatccctcgccgttttcagatctacctacttggcctggtaatagaggaacttttgagcgctcaggaccaagatcaagaccgtctctcaccaaagagccgtctagaagagacttgcaattgcctgcttttacgctctgttcatcttgttttgcttatacggcattcgcgtctttcacgggagacaaattagaggaattggatatctcccgaaactccccactcccaatcctgctattcatttgcttttgctgcgtccttggaaagagcttcgtgccttgttttcgcgttcgtgcccccgttctttgcgttcagtgtttttttgctcatgtgccattgtcgccttgggtacctggaactgaacaccatcaagatttggaatctggcaagagatttgaccggtccatctggtacgtgtgcgaggtacgagttccaggtgtggttacttctctcccctctttcacaccgagttggtgttcgctttttcttccatgctcccttctatctagggattggatagggactggatttgggatttgggatctgggatctgggaatcttaaaagtgatttctcggcgttggatcgttgtagatatggattttttggatatgattcttggctctttttggctattgttatttatcttcttttctttccccttctcttgctatttattcatatttttgactttattttcggtttcttgttattgtagatccgcgttcgggactaagacttagtctaagggcttaactagcaccttctatccaatcaatgttatttttgtctcgtctgctaagcagtaatgggagatgatactcaggctagtggaagttgttcagagtcatagtttcatttgtgcttattgtgaccagtaagatctctttcagtctagtacaaaaccaacctcgaaggcatggcaagaagcaaagagaagcatgtaaaaaaaaaagcaaaagcagaacccaccctcacttgtaagcgccacgagaagctagaaatcaaagaaaaaagcgtagtaaaagacccggttgctgaccatgtcgatatttgggtagtgagaatcatgaaatatttcgcttgcacaaaccgtttcgagggcgtgattgaaaagacgtagggattggttttcgtttgtgccatgagatagagcacatgtaaggggagaaaaatgttacagaacgaggaaagaaatgtcatcaatggagatcggaagatttgaaaaagaaacaaggagtgatggtgtcatttcgactaccattcgaattcaccctggcccttgtggaagacgtatctagttcggttagtatatgcataacgtgggagagtgggatgacttactctttgccaccagtggtcaagatgccatccttcagagtgcacttccacttgttcttcacgcgctggactttatcgtatgtgcaaagcatgacctggccctccgattcatctgcgtcatggtcatcggcaacgaggtcatctggatcatccaggtccgaattgatggcgtcttcatcttcctccttgatatcgtcttctgcaccatcaaactggccagtgacgcggggggtagatgaaggtgacccgggggtatcttggctgagaggagctgtgagagccacacggcgagcgaccctagaagaggactcatgctcttccaagggacgaaggagaccaccggcctcatactgagacatgcgctgcttgagatgctcgcgcagaagtcggtcaccttctccactctcggcagctgctctacggcgtgctacctctgccttccagtcggtcaatgggtcacctccaccatcagtctgtccaggacccatgtgtgggtaggcctgttcttgtttgatttgtggcatttgcccatgggcattggggtgcatctgcggatatccttgtccagcttgggcctgggcttgcatttggtggacggagttggcggctgcggcgccgtatttctggtgaagcgcatttgcagcacggtcgcgagccgactgagggttaagaccatgcgggggcatgggtgtggtcaagtgctgcattccgggttggccgttggatccgggctcggtcttgatgcgaggcccacccatgggaggcatagtgtgcgagggcgcaacttggggaattgaaacaggctggtggacatattgcggctggggaggttgttgtcggggaacgttggaggggacagtggcggtggggaggggaacagagtgctgttgagcaggctgaggagcaggatcccaggggaaatgagcgacgttcacagaagaaagcttgtgttgccaggtctgtatagatattaattagtgtcgggtctgctgtatgagataatcaagaagagactgagtcttggcggtctaaaagcgcctaagcgggtatgagcggcacatataaagggagcactcataagccggtgtccccccataagcaccgcctcccgcaccacctcgcccatccccgcttttggggaaatcatccacaccagactttgacaacacaagatagacaatatgggtagggaaatatgctactaacctcacggagatcatgcagagtctgctgatcgacaccactttcctcaaaatcgacctgggaggcatcacagacctcctggatgaccttctcgaacaccgcaccctatgaaggcacatatgtcagctcttatttcaatggaacccccaagatggattgggagaacatggttatgagtcaagagtaagtcgctatgcgagcgacagctgggaatagacaggtggtcgccagagaagagttgggacttaccacttgctggttggacatgattgctgagtgagaacaggccgatgagctggtggatgattatgcgaagggatcagagagctaggaataggtgaatggtgaaatgtactaggtaaggatagcttgactaggaagtaaagtgctccgtcgcaactatcaagttgctgatcgatcacacccacgaatgacgcaataggaagcaatttgtgaatcgatagtttgcacacaaatagaaaagagaagaaatagtctgaaagacaagtgccgcaagtgcaaatgtcagaggaaagcaagacgatgagtttcgcgatgggttagcgaaggtgaaagtcacggctctgcggtcgaaatcccactgtatccctgaggcttagtcatcggcgactaacccactgcgcactttcaagtagaaacggaagtgaattgaaagatcagagaaagaatacagatgaaagagatgatcatggacgagcaaagtgaattaaaacagtcgtaggaatggcatttggacaatttgtacagccagtttacggaaaaatagatacagagaacaacaccatcagaacaccgaaatcttccaaagaaccattacaccgacattaatgtcccggctcatcaatgctttcaatatcacaatgaacaagggtattcaacaaattaaagcaaaaaaaaagattttccagtcctttagcggatggtcatagacttggtcatttgagccttgctgccgacaccaccctcacgagaggaggaggcactgctaccggccttgcgctcaaagatcttccagaacttcaggctctcatcagcagcagtggtggctagcatctgtccatcagggctgatagcactgtggaggacacgagtctcgtgagcagggatctcgacgttgcggaccaaagttggatagctccagatactaagagagttgtcggggaagccgctagagctaacaatctcgcggtagtggttgctccaacggagagaagtgacttgtgagccagtgtcaatgctgttggtacgggcaccggtggtggtgttccagaagtgaatgtgacggtcgtaggaaccaccgccagtggcaagaaggttggattgccatggacaccagctcaaagccttgacggcggcgcggtggttggtcttggtgaacttgggagcgctcagagaacgagcatcccaaatgttgacaaggttgtcatttccgccagtagcgagctgggcgccgtcagagcgccattcgagaccgcagacctcagaggtgtgagagaccagttcagcgatcttgtgctctgcgatgcgaacatcgtggttatagacaagcccactacgggctccagtggacagagtgtgcttattccagcccataacaccgacgcgggagtcgtggccgtacatgctgcgaagcttagaaccttcctcaacgtcccaaatctggacctcaccggttcccaagccaacgccaacgtaggcaccatcaccactccacttcacgctgctgacgtatgtgtcgggggaggtttccaaaaggcagttaacagagccggactcggcagaccagacatagacgtttcgctcgagaccgatggcgacctggttaccagagctccagtccagcaaattgaggtagtagtcatccaaaagaccgggggcgtccaagacccgttcgggcgcagtttgaacacggcgacggaactgggcagatgtagatttggcaggtcgcaggggacggttatattgagcacgaagatcaataggcttcgatgactcgggagggggaggcttaaatgcgaggatgcgagtgttcatgttcaccccacaagcttcagccagagatgatttgtaggccacggcatcgggagccgggcgtgtgtaggtaggaggatcattatcgtctagacccaagctctccaaagcagcagttaggtcatcatcggatccacgcgtgccaatgtcaaaagcgctgactgccgaggcgaggactgatgatccatcagccgcaccgctcttagggcgctgtttctcttctggctttgcggccccgctagtagccagcccctcacttgcggtccggttgggaataaaacggtcaccagcgttgtgaggaatgcgcacagttgtcttgctggtacgagaccgggtgggaatctcccgacggacatgctccttggtaggagtgttggctgtggttgcacttgtgccggtcaaggtccaatccgagacaccgagctccaagtgcttgggtgatttgcgggtgcgggtgatggcaatgtttgacttgttcgacttggtcgccttgggagattcacggtgggtggtgcgggctgcttgagctgcttttgagatggacttggcgaagtgggcagagaggtttccaccgtataccgacttggtttgactgcggccagcctcggactggcgaggaggaggggtgaagggtgacgagtggccgcttacgcgggggttgggcgaaggactcagaggcatccggcctccagcggtcttggaagagaaaagcccatggtggctcttcaccggagttgacgcagtaacagaggccatggtaatatatgatcagagtagatgtaaaggatcaaccccaatagaagatgcaatacgaatcaatgcagaccaacagaaaagtatgcaattgagaatagtgagattgaggaagaaaaaggaaaggaggtcaggagacacgcgaataaatagaaggtagctatggagtactatactcgttgctgaaaagtattgaggctctccccatagcaacggttacctgagctacatagaacgctaacctgtattgggactagcgtcgacataccacgcttgcctttttgggtgacacttgtcttggcattaaattccatgccaatagcctcttaattaggcaagaacaaagaaggcgagaggctatacagaatatatgtttgatagacctcaaatgaagaaaatgccgtgacctacggtgccagttgcggatacaattcatagccccccttttcgccactgggatggcgcattcatctcctctttgcaacccccaccacgctcctctcacccagttccaccgagacccaccacgacttctccctggtcgggatcttcgaggggttttaagccgatatcctgctgtactccctctatggcaatgcaggacgcctacctgatgcctaccagccaggccggcggtcgtcggaccagcgccgattatcgacccagcataaaaaaggcccagggccatgtccccgcgtgcctggtcaatgcctcggtgacgtactgcagcaatgatcgcatttatgcgttcgggggttttgaccagtttactgatgaaggttcacatcaccttaagctataattctaaaatggcactaatgatttttagtttacaaccacgtgctccggctggacttggagactttgcgctgggagctcgtggacaactatggcgatatccccggagttcgcatgggtaatgattctctcttctcattcgtccatgtttagtgataaacactctgactggaaatcttattttttatagggcatacggcgacattgtaccaaggggataaattgattgtgtttggaggcgaaaatgagcatcgcgaatacctctccgacgttgtcatccttgatctcaataccttcacctgggcactccccgaaattcgcgggtcgatcccgcgtggccgcgcccgccatgctgccgtcattcacgaagacaagctttttattgtgggcggagtgacaggtgtgggaggcgtgacaggggagaagaatgtgatattggatgatttgacctatttggatctacaaacatggacttggtctcggacatggagcttcactgctcgcttcgatcataccgcttgggtttggggcacacggctgtggatatttggtggattgggtccgaacatggaacggactactgatatctggtggctcgacctcaagggatctccttcgttggctggaaacaccactccccaaggtagcgtcaactccctgggcatcaatatttcgggggcttatctcccagactctatatctagtcctcatcaaatgtctccccgctccggaatctacgctgccaattcaggcagtgtgcaggtacgcaatttgggtcgacgcaagccagtcgcgcccggtgccatatcttgtcttaggtttgattctggtcctcatgtcccctccttgttttctggtactcattttcattcattcgcctctggtgtcctgctcgacctaatcacgccgtcggagaccgtacggtcgcatgattgtaacctgtcggctctggacctcaactcgctgcgctggcaacggctggctgatggtcaagagatctttcggccgggatatcgatggcactattgcacagtcaatgacacgggtaccaaagcatggctcttgggatgtagtcttgatatcgcgaatgtaccaggcggaagcgacgagaatcatatgagtgaagtcctgactatcgatttggaaaagtatggtttactaggtaacggactgtcgtcagaaccccccgaacaaggcgcaccttggccgtcagatccaatgggctcctctcaggtttccgggctcgggaccgatctagccgctgttttcgacgaacctcctgagtctggaagtggtacagactttgtcatcactgctattcgtgacgatcatgacgggtccatatcggaagatatgggcgacacgccgtcggtttccccaacccagacccagccgacctttgtggcgcagaaccgctggacctcagagcccatccatgtccatcttatcattctccaggtcaggtggccacatttcaaacgcctgtactccgcccagatggctgagtaccacaccaagcggatgcacatccccgagccttattctgtcgtgcgcgcgtttctctactacctgtacacagacagtatctccggccatccagactattgcttgagtgccatcgatgtggcgggtatgcttgttatggccaatctttatgacatgccgaagcttcgcctgctgtgtgtcaataggttaagccaagagcttgacgtagacaacgcggccatcatttgggaacgtgcggggcggaccaatgaacactggttgatgcgccgagcagcacagttttgcatgacatactggggccgtgtggtacggacagacgggtttaaatccctcagccaccagagtttgattcaactctgcgaagtggtggatacagaaggtcgcgtcttcgcagggcctgaattggagatggtcacattcggagcagattgcctaagtgaccgagataagacctctcgaatgcggctgggatctactgccgatgagatgtccgaggccgacgcagacgatgaagggatggagatctcatgaattgcatgaattgcatgaattgcatgaaattgcgaattgcacgaatggggcacgcattatattccggagttcttggcggatcatttgtttattaggttgtattgtatttacatccatctctaccagttttgaatatacttcttccacttctttgtgatcggccgttcaaccgctctagggctggcgttgagcccattcgtcatgagatgtggagcctctcgacgctctcgacgcggacctcagtccggatcgcggaggtcattcctgtcacgataaggagctctccatagtggtagactcactggatttcaagaagataaaaattaaatagaattagataaatatcgatgtgcgctcgaattaaacaatcggattacacggcttctacagttcctgctttgattaacattcattcacgtcgccatggaatctaagcaatctactcttccctcggatttcctttgggggtttgctacagccgcataccaaattgaaggagcagttaacgaagatggccgcgccccttcgatatgggatacattctgcaagatccccggcaagattgccggcggcggaactggagatgtagcttgcgactcatatcaccgcacacacgaggatatcgccttgttgaaagaatgtggttctcaggcataccgattttccctttcatggttcgtctctttgtgttccttgcctcgagtttcaatctttggaaatattttaaccagcttgtcaaaatctataggtcccgcattatcccactcggcggccgtaacgatctaatcaacgagaaaggcatacagttctaccagaagttcgtggatgatctgattgatgcgggtatcacacccatggttaccctcttccactgggatcttccggatgagctcgacaagcgctacggtggacctctcaataaggaggaattcgttgccgacttcgcacattatgcccgtgttgtattcgaggcctttcggtccaaagtcaagtactggatcaccttcaacgagccttggtgcagtagtgttcttgggtacaacaacggttccttcgctccgggccacacgagtgatcgcaccaagagcgcggtgggagatagctcgactgagccgtggattgtcggtcatagcttgctagttgcccacggagctgcggtgaagatttaccgcgatgagttcaaagaacgggacggtggtgagattggcattacgctgaacggtatattcccattcttcctgcatctacggagccgtttactaatcagaccatcgactaactaggtgactgggccgagccctgggattctgagaacccagccgatgtagaagcctgtgaccgcaagattgagttcgctatatcatggttcgcagaccccatctaccacggcaagtacccagatagtatgatcaagcaacttggcggccgcctgccaacctggactccggaggacatcgcccttgtccagggcagcaatgacttctacggcatgaaccactactgcgcgaacttcatccgcgccaagacaggagagccggatatcaacgatgtcgcgggtaacctggagctcctgctcgaagacaagaacggcgtgggtgtcgggccgatcacacagtcgccttggctgcgaccatctgctatcggattccgaaaactgctcggatggctcagtgagcggtacggctatcccaagatatatgtcaccgagaacgggactagtgtcttgggtgagaacgatatgccgcttgaggagctgctcaatgatgagttccgcgtgcagtatttccgggattatatcggtgctgtggctgatgcgtatacccatgacggggttaatgtgcgggcgtacatggcttggagtcttatggagtatgttttgagcttagttcctcgatggtatatatccgactaacttttttacttacagtaacttcgaatgggctgagggctatgagactcgcttcggtgttacttttgtcgactatgagaatgaccagaagagaatcccaaagaagagtgccaaggagattagccggatcttcgatgggttgatcgagaaggtctgagatagatgcggcgctgattgatatttacgctggtagactccgaggactgctatgatacctagattctatacgaatttttgaaggcctatgatattacattctccagttatgccgtgagctgtattgttcggtacgcagtatagaaaaacagagatgaaaggaggtacagtatgaagtagctgcccttgtggactgggaagcggttggatggtatcggaatactcccatatcttccccctcttgcagtggattgacgattggccaggatatgttgagaagattgtcgatcctttgccgctggaggatgccatgatgcgggttgtctttaatgatctagaattttagagcgagataacaacacttgtcgatcacaaaggcttgattgtgatttgctcaagctcaagtcacggtccaaactagagcttgatagccagggattcaataatgctccaagcttgattttatttaccttaaatgagttgattaagccttgccagagagtaaagctgataattcccacaatataattgatagtgatcgactttcgcgagtctatcatatttatgaccgaggccgatactttatcttcctaaggctaaagttcgtggaacggcataatttcgagcagcgggtaaagatccattagaagtgactccagagcaactcggaagtagcctggatattctccttcttcgacctgacttccatgatcaaacgatacatccaatacatacacccacggcaggtcggttgccatagagtccatagcaactgaatcgacaaccagagacacaccagtgtcaagtctcggagcgataccgttggactccttgtactcatagtattccctacggcgagaatttgtaaaaagccatcatacgacctcccgagcctccgtcgtaaggataggaatgagatcttactgctggatctgtttatgtgtggcgccttgtaaatccttgtcttcgtagcttggcatgaagcatttgtcttcggcgttcttccacccgcggattttcttggtcatggtttcctctatgcgcgcgtagtctttctcccactgctcccagcgttattgaccagagtaatcggttcggaacctgatatatccaaagtcatcgtatccttccctttctactacctgcacaacgaagtcgacactttcttcaaagagtggcacccccggacaaggtggtaggccccgctccacgcggagtctccgtcgatgttcgttgtggattgcacggccgatcactattcggacttgaacattctcgacagaaactaaattcttatcaatctgacggagttcctagacgatctgtattgaaaggagaaataattccttgttttagtggaagaaatctcaaacatttggttagatcacccacttcttctggtatctcgcgtatattatcaagcagtttgaagtcgctccagggtccatcctggcggtacacaagacatttcggggctgagaatcgcagacgtctcagaaaataaagcacatagattgaaagaaaagaacgtctatacaacataggaaggagtgtgggaaagggaagtcaagaagaaatggatagttggaagcagtcacgggtcatgaaagcttagttccaagggtcaaagaccctgaactggagcctgggctggagcctatgctagtgcctgggaagatatcctaagcccaaaaaggcaaagatttattttaagcttctcccgccccacttccgagccgaggcatcgcgaggaccgttgataaaaccggcggtgtgcagtaaatacccggcggtgactacaggcaactggcagtaatagtagccgcactccgttccttcccttttgagttcaccagcatggatatatctcagatctccaagcagcttttaccagcgccgaagagattcccagactgctgcttagccatctccagcaccttaatcacctaccttgcttcgctcctccccgaaaagcctaaattcactatctcaatcggcagcggatctggtctcctcgaaggtctcattgtgcattacgacaggaatgtatcagtggagggtgttgaggtggattccactattaatcggtacatcgccgaagaagatatgaatgttgtcggcggaggttggggtctctggtctgccgcccaacaggcagcggcgtggatgtttgtctacccacgcgacccaaaactcatcaccaaatacattgataattatggtggtcaaaatgtggattttattgtctggcttgggcctcgggttgattggccagactatgagacgcggttttgtcaatctccattctcggagttgagttttccagatcatatcggattaacaccatatgagactgtggtggttgctagaaggccatgttgatatgaactctgcattttgacttgggaagattatgttatacgactagtagtgcattggaaggctttctgttttgtaattgagtcatggtcccttgtcctagttagattattactatcacgatgtcatccctggattaataaagaccatatttgcttgcttcatttcttacagaacattatcagagtaaatcatcatggaatattgccttccagtctcacatagtaattcatacattaaatacaaagcccgtggccaagctcaaagcgcatacctgaaatgtttggactccatatccgtcaagtccttgaatccatccaagatagcctgagaggtgatgtcctccggagtttcatcactaccagccgcaacagctgtagcatctctccttctattctccattttcatcgatatatatgtcgcacatgctagaacaatgatgcccgcatagcaaatgagcaggcccagcagacccgagtaatagcgcggggcctcgtcggcgaagaagatgttcgctccggcgacattgccagccgcatatagcgagaaccaaagcccattggcgaccgcacgcttggtgtggccggctacattggtagcaagtaggttccacgagataataacgggggcaccaataatgtactgcagccaggtgcatccgactaaagtccaacggtggtcaaggctggtaaagcggatacccagaaggccaccgaaggggatcagagaaacgactgcaagcacgatgcagcgggaatctttaacgtaggtggcgatgataccgcagatgggaacgactacagcttcaatcgcgccggtgggtagttggaggagtgtagtgtagatcccgctgaagccatagcccttgatcaaggctgatgcgaaattcgatgagccgccgttgataacaccgcaggcaattccgactccggcgcagcagaggactctgaaatcgtagagaatctccagcgcctggcgtggtttgatctctcgggtcttcacgccgatcatgttttcggcgacacgctgcacggcaatcacgcgctgtcggtgggtcaggaagcgggcagagctgggcgagtcgggcatgagccagaggaagatacaggcagtgaggaagttgagtagtccgatggtcaagaagatcaactgccagctgcggagcgcggtgttgtgtgaatggccgaggccgaatcctagtagggcccctaccatcgtggccatgccgtttgcactgagccagacagccatgcgcaatggctgctcggagcgcttgtagaacattgatgtcaggttcatcactagacagaacaatgttagtccttttcgtgtctctggtttgtgccgtggtctactcactgcacggactgactccggcttctgccattcccaggaggaatcttagcaccaagattcctccgtagttcttcgctccgacgtgggcaataacgagcacactccagatcagaagcataccgcccatatattttgcgattggcaatcgttggattaggaggttggctgggagggcccagaagagataaccgaaattgaaaatcgccgcaacccatgaatatcgttggccttcaagaccgagatctgggatcaaagagtatgcggatgcataattaagtgatagtttgtctatatagcacgttagttatagaattaacaataggggaatgttcttgcataccgaggaattgaataacataggtcaggtagagctaaaaacacgatcaactgtcagaaacaacatcaaaatattatatcacagtcacaactcaccaccggcataaccctccagtcgagaatcctcagcacctcggcgccctcagtctccagttcctcggcagtcagctgctctgcctccagatacagattcgctccgatatcatgagtctcgccgagtgccacatgtgtgacatccttctccgcagtggagtggtcctcctttgtgtcgttggggttcattgtaagtggcgggggtcaagttgaacagaactgggccgtatatcaacgtccagcgctctattatataccccgcgtactttttcagccataacttgctatcaacgccaagcagataagcaatgttctttctttatctacaaagctatctttggtcaggtcgatcgttggagataggaagatgagcggccaatagtccgcatataaagtgtggggtaagcggactattctccgctgtacggggtcatatacttcgtcctgtctagatcactcgaaggcatcagacgaaaaggaaccatatcactcgcatttcaaactttcaaagcactcctcggcatggctcaccaatcccaagacttatcgctcctggacgccagtatctcggagctccaatccgcactctcttcaggattgctctctagtgtgggcttagtatcacgatacctacaacgaatcagcgtctatgatgcaagcaatctaaagcttactgccattccgctcctaaacccagccgccctcgatgaagcagccgcgtccgatgcttggcgtgcagctggtctgccgccgcgaccgttggagggtatccccttcctcgcaaaagacagcattaaagtgaaggggatgaccgtggcgagcggctcacctgcatttgaaactctcgtcgccaacgaagatgctgcctgtatccaactcctccgcgaggctggcgccgtgcttctcggccggacgaacatgcccgccatggcgtacggtggtatgcaacgtgggtgttatgggcgcgctgaaagcccgtataatacagcatacctggctgcggcgtatgcatccggttcatcgaatggatcggcggtcgcgacggcggccaacttttgtgctttttctctaggcagcgagactgtttcttcgggtcgctcgccggcgtcaaataatgccgttgttgcatacacgccttcgaaaggccttcttcctctccgtggtgtctggccactctacttgacttgtgatgtcctagtaccgcacaccaggactatggcagatatgttccacgtcctagatgttctagccgtgtccgacaaagccccgacgggggatttctaccaggaacaaaaactcatctccctcccttcgatcgatacactccgaccacagtccttttcagaattgcaagacggcacatccttgcgcgggaagcggatcggtgtaccgtcaatgtacatcggaggcgataactgttctctatccccagccagcagagtcaacacccggccctccataatcaagctatggaaaaacgccagaaaggccctcgagtcctgtggcgcggaggtaatcgaaacggacttcccaattgtgacaacctacgagtcaaacgcagacaagggccagctcgtcaccgtcgcaggactaccagaaggatggtccgcgctggagcggagcgagctcgtcgcacatatctgggatgacttcctgatcaacaacggccaaaagggtctcgatagtctttctaaggtcgatccgacgacgatcttccctcttgcaccggggtctctgaagggtgcacccgatgcggccaatgcgctgcggtgggacgagatggttcaatacccgcaccggaggccggcgtctgttttcgatatccccggtattcagcagggaatccaggctcttgagaatgcgcgcaaggagacttttgaggactggatggatgggcttgggcttgatgctgttgttttcccagccaatggcgatatcggagctgctgatgcagattgcgatgaggcggcttcgctgtttgcgtggagtaatggcgtcaagtactcgaacgggaacaggcctattcgtcacctcggtgtccccactatctccgttcctatgggtctcatggaagatacggggatgccggtgaaccttaccttcgctggaaaggcatacgatgataacagtctgctcaagtatggcttttcttttgagatggcgatgaagggccgtgttaagccaccgcttgtgcctgctcttgactctgatctcatcaagggtggtcaagatcctcggccatgggcttctcgatcgaccgttgagttggtagtggagactcaagtgaagaagattcaggactcaaccgttgtggttcaaatccagggatcagtggtacccaaggactctcaactggagactatggaatgccatatcaacggtcaagtgttcaagccggccatggagggcgatagatggtttatcatagcttcctaccctgcatcggaacgtgatcaaccctggaagaggtggtcgagtcctgctttgacacagactatcatagtcatcacagctcatacgaaggatggctcgacaacgggcaagttgatcctactatgaagacttagtgtcgtcaagaaatgtaactcttctttccattactccattatatagacctcctgaaataaattacaaagcgctcatatttatgacatctctctataatcttcctctaaaatgtcctgatgtatactcctcccatatatcatatcttcaatcatccccaagacagctcggtgtagataactcttcctcaactgctccaagtgcaattcagccacttccagtggtattgcagcactagaattagcttcaaatgtgccagaatcccacatgatcttctgtcgtacgaactccagcactttcatatatggcgttgcgtcgttccaccggtcgacaaagccagctagattggctgcacatgtagcaatggcttgctggttgttctctctgatacgctgttgatcccgaatatcagtgataggggttgtcgcccagacaatgtaaagcatcatgattcccgctcggaattggaatacaagctaatgatgattgatggttagtcaaaatcacatcgggtgtacctcgatcggaagaaaaagcagaatttcgacacatactgcagaccaggtaaaacacatcacatgtccttcttcttgcagcagccggaaattgagacagacctccgctatcgtcgcgagaatttcctctattccgtccatctcgatgagatcgcctttttcttctatcaggatcaagagactgtaaacatacagctttcgcatccatataggatggagatagccgtgttggtcactgtctaattcgtagtgtggaatctcttgtcgccatctatcgagagcggacttgaatgaggaggtataacctttaccatatctggcgaggggatttcggggtcggttctcccgcgttcttctgatgctggcttggatcttgcgtagtcggaacaagtgtcttatagcagggtttgtgcttagggttggttggagggtatctcccagagtgcacatctaagtagagaattagtgactgtgaaaagcttagaaagttgggaataactcacgtcatcgtcaacaaccctgtaggcagccgacactggtcggtcccaccctgaaacaatgacttcattgagcatgtagcaagtaatgaacatgttctcagacaaaacctcgctaaattcggtcatggatccattgtcgcggcatatcgatacgtgcttccggatctctgtcatggcagctgtacagaaaggtagcacggaagagacgctcgttatgatgtcctcggaagaaggagaatgcatagcatagagtatcatgaacagtgaagcttggatttgcaagaccatagacgaatgcccgacaacatatgggtaatatctcatagccgaggtatgatactcctttgaccgaacggagtgcgaagggtctcgttgtaaaacattgcaaagggatgcaccaatagcatacaccatctgcagaaagaaggctttccattcatcctgcccttccaggactgcctcggcatgccatgatttccaagctgtttcgttcaagaagggccattcgcggtgagtcacggagaaaaacacatttgtatagagctctttgagccaaggggcatcgtcatcagtcaaaggatacgagggtgccaggtcaatccaggggacgtcgaatgtcgtctccgggaataaagagaacgcgtcaggcgagaaagatgatggatattttcgcggtgatctttcgctgctgtgttgcaagtctggcagaagcataaaagagccgtcattctccccgctactattctgctcggccatcaggtagtccgagtcattgcctgtattactgcgcttgtgttctgggtcttcaaaatccgtctggactccagcatcacatgtttcgaccgtggtctctataacgctagactcatgatccagctctgcgacccgttgctcgagttgtttcaagtattccagcgggattgtgatgttatctcccatcttccgagaccgagccggcaagcattcagcgcccttgcgacggcattcgccacatgaaggttttgcatgatcacatttccgcttgtgacggaaacagcgatcgcatgctatttctctgtgcttgagagggcgcgacatgcagcaattgttggacacatacagggagtgagagggaatgcggggagactcgcgataacggatccgcgccggtgcgatatcagtcctttaataagttgctgcagaaggaaggtctaggcgatgataagaaatgtttggttgattatatatcctgcttgtgttaagtataacattgtaagagatctgtcaagtcaggtcaactggaaataaagtccatggataacattcatattcgtcccatacccgcgctcactgtcagtcgacagcgacaatcagattttgatccatctttgagccttggtatcatatccgatcaacttaggatcaacatgtagactcttgagcatgaactccattgtgaactcctgggtaacaatgtcagcgcatagattccacccaaaaccacagtaatatcacaatacgtacttgatcctggctctcctcatcatccttcttcagtggccagccagaagaatcctcagtcccgtagttatcaacgtctccctcgtcctcatcgacgtcctcccgctcacgattctccccatcaaactccttccaccgtgtcgtatcacgcttcgaccgctctttccaagccgccatccctcccatcccatcaaacctttccttggcaccgacaaatacctcatcggctgcgtcctggctggcgagccgccatttggtgatgagagttggaatctcgatgtatctgggattcgtctcgaggttgtgggcctgatttgctgtttcaagtttggtgatgagtgcatcgacctttgactggatctcgcggtgctgcttttgcagttctagaatctctgggtcggtgctttggaatgattgtaaagggaatgaggaagagattcgtaccacgcgcttgcgcttagggggtactagagttgttgctagatctggtgaatttgatgttgagttggactttacagtgagggtaggagtcgccagaatttgcgtgtcctcgagtgcgacaggcttcgatggcatgtcgtctatctttgttggtgcaggtctgcgtagcggggacttgaacggctttgagagagcggtagctgcgtcgatgcgacgacgtttaatagacggcttgtccatgatgcatcaattggatacagacctcggaatttcgatgtgtttaacgaggagaaagaaacatagaaaagttggagaagccgagtgagatgcggagatgcgatattcttatcgataagcaaacagactatttatctacaattctagaactcctcaatgaccaactcctcctgctacccattgcccaaagtcaggttcaccaggctgagggaataatccacggtcgttggcattcccatctccattcggggcattggcgttagcgttggcattggcgttctggttctgtcggttgcgctgctgctgctgacggtagtataccaaaaccaacagcgcagcagccagtccgacaatgaggagaccctcgagcattccctcgtcgatatcaaggtccaggtcatcatagtagccatcttcgtggccttcggattccaagccacgatattcatcatcatcaccccgttgtagttcataaaggtcttcgtaatagccatcctcgtcgttctcgatgaaagccttgacccattccttgaaggtacgacggggcttcgagtctagtgataaacgtaagtaagaaactagaacgcgattaatttcacggggtaagagcgaaggagcagcttaccttcctcctcatggatggggttaatgtctccgttagtgatgcgattccagtatcctcgagcccggagtttgatcaagctgagcttcactggcagatacgcttcggggctgaggtcaagagccaaatcataatatcgcttggccatgtggaaatcctgatctactgccacgccattctcatgcatccatcccaaattccagtagccctgggcactgtggtgggcttcagcagcattgtggtaacaggtcgaggccttgtcggcatcgataggtgtaccagtaccagacaggtagtagtcacccatcttgaccaaagagtcgatgttggcttgcttcgaagagcgggtccaataaatcaaggccagtcgcgcattgcgcatcaaggaggatcgagccttctcagcccatggaaggatggaatttagtgagagtacggagcgatgctcatcaagcagataagccacatttgcctgtgcgttctcatagccttgctcggctgccatcattgacggaatgagagcgccctccttatcaccggtttcgtaagcagcgtttgcctccacgaaagctgagtggacgatctctgctttttcggcaaccattttatagtaggcagcggccacaccacagtgacgctgtctgccaataccgaagttggccatctcagctagataatagtacgcctccatccagccccagcgggcggcaagctcgaagtaacgtgttgcggttgccacatctccttggtccaagaacagagcgcctaatcgtgattctgacgcaggggaatcctgctctgccgctgctttgaagtagtgagatgccttgaaggcatcctgcggaacaccatagcccttgagatacatcagacccatccaatgctggcacatcgggtccccgttcgtaatacccctccggaaccatgtgagggcagtcgggaagtgttgcttaacaccctctccgcgaaggtacatcaggccaatatgtcctgcggccttggatgccagtttatcaagccctgcaggggggtttgagttgacggacccatccttgttccaatatttcttggtaacaaccttgaaatgcttcatagccagtcggaaattccgcggcaagccccgggcgccctcgaagttcatcttaccgagggtgtatgtagccttcagttcacccttccgggacatgagatccaagtattctagtatatcttctacgctggcctcaggagaggcattggcagcgtcccgcgcattttgacccgagctcgacacactggctcctggaccgtagacaccaccttcttcgtctgcccaacgataagattctcgaaccatagacctaccacccggagggcctgagcggtagtactcgatcgccttgtccgcaaccttcttgtagtaatggatcgcatggtcacaatccttcggcgttccgataccagtgtggtagcgatacgcaagtgtcatctccgagcgaatgttccctgtttccgctgcaaactcgtggtacatcagggcctttgcctggtcgggttcgaccgcaccgccgatgcccgtcgcatacatgaacccgaccatgttctgcgctgtgttgtttccgtccaaccatgctagttcgtggtaccagcggaaggcctctttgaaatcgcggggatgggagaagttgccatagaagttcatctctgctaacaagaacatagcatccgggtctcggtcttcgtctgcagctattctcagctcctccactgctcccgtcagatgtttgtttattttctgctcgggtttttcagtcgaagggcggttcaagaatagcagtcggaccgtttgacggccatagtatgtgaccgtccctagtaatcctctcgacttgtcggattgaaggactggattctttattgtgcgaagggtattccaggcattctcgactcgttctatcatcacgatgaaggcaatcagtatcaagcgtcaggcgataaggcacaagtcgtctctactcacgagtcataggtcggggttctgcttcccctgccaggaacgtaaattcgtggtctgcatcgcggcccgttgccgcggacgctgtttggtcagtaagcggctgaccaggcccagctgcgcatgtctgcaatagcactgaaaaggggtgtcagtttccgatgcgggcctgcaggtgcgggcaaatcttacgcagggccgagagaaagtgtgaaagcggcgtcctcataatgcctgcaaaatcctgatgtagtgttggagtgtgaagcacattgcgactctcagagcaatgagaatcacaaaagcgacagagctggggatcgtgatatgatgtagttgcagagtacgggccacttggcttgacggagcttcattttgccgagggccaatcactacatcgtacctgtgtagctttctacgtgcatgcatattttctatatgtaagatgttatatgttccgagattctgcttgtctatctcgtttaacatgttctccaattcgtatgtagctttccttagcctagactttagactatctataaaagcggtgagaatatataagctgccgaagtagagacatcttgttctctactgcatacgaattatagggaaaagattggaaatttcataagcattgttggaatctactcgtccctctggagggtgtgtacaaacgaagagaagtcaaaatacatccccggtgcgctttccatgcaataaaaaggagtcgggcaattccccaatggcaatcaaagtccgcacccctatctcacagcatccatggacagtgtcctcgattctgatcgaaggttgtgcggtcttcgcattcgcgatgggggaatagtgcgccgggaaaacaaagcaatctcagaacgatggcggctgaaaccaaactggcacgtgttgttggttaattggttaaaaaaaagactaaagaggtacaatgaatgggagacaatccccgatatcgtgaaaaaaattatcaaatcatttccgagatttgtagcgcgaaaagatcttttttgtttaatggttgagcttcaagttgatgatggtacagatgtggaacacgagcctgagacaggcaagccatcttcgtaccatattcactgacgcggcgacgttgggctgtacgccggggatgtcgggctatacgccggagaggtaggtgacgtcggagaaccagagaaattgggagaagtcggcgagtatgactgggggctcgtaggagaccaaccaggcgaggttggagtgtacttgggagaagtgggagacgttggagacaggtgccgagcaccaccaatcgcgggactagtaggactgtagctcggcgaagtcggactgaatgccggggaggccggactaaagctgggggaagtcggactgtagttaggcgacgtcggcgagaacccaggcgaggttggagagtatgaaggagaggtgggtgacgcttggccgtatgcaggcgaggtcggcgagtagatcggagacgtgggttggaacgttgggctagaagacgagaacccaggagaggtcatcatcatccgcgggcttgtcatggagatgccaggagacgtcggcgagtagctcgaagacggagagtacataggagacgttgggctagtattgaagggactcgtcggcgagtagctgctcgggctgcgaggcccaggactgaacgcactgaaggtactggagctagcctggtactcggtgagacctccagtaggctcctggccaatttggtgcataggcgagaacgccggatcgggatcgctaccggccatgtacggggagctggccataggagaaccagtatcgtactgagtggcagcaccgtcggaaatgatggcatccttcgcgccgaccgcacccatcagaccatagcgtgcattgttggacacgacggtgttgagcaagttctggtccaggtagacgtcgaactcacccgttccggcaggggccatctgtccaaggatcaagttctcagacacaccgcggcaatcgtcgagctctccgaaagcagcagcctcgagcagaatctcaactgtctcttcgaacgaacaacgcatgagggcaccattgtcggcacggttgataccatgacgggtaacgggagtcagataaccacgaacagtcatgacatcgaccagcagagccaagtgacggtgattaacgtaagaaccgtcaaaggcaagcaccagggtcaattcgcgaagcacagctgtacgggcagcctcaataccgaagacttcgaaaatctcaataaactggttagagtaggtgcgggaggcgtcaacgcccggaatcgaaaggacagcagccaaagacgatccactggtttccaaaacccattccttgcagagaggatcggacttgctggtgtggagtgaaccgtcttcgatgactctgaccttgctcttctcattgatgaaagcacggtcaacgccgggaacacctcgaagggtcaaagtgtccagcaggtgttgctcaagcttcttcaaggtgacgtcgtactcaacgtcttcatcatcgtcctccttgtagtcttggacttgacggatacgaataacctgctcgtctgcgttgttatcactgaagatgacagcaatatcacgaggataagcctgcttgattctggtagcaacgtcctgcaccgtgagacccttgtcaagaagagagcgacgactgagaacaatacggagcaaccacctcgactgctgagatgcgtcgtcggcattgtcttcgggaatgatgaagtacgactccaccatatccctatcgttctcaatgacagtggactgaatatcgggatcatagtaaatctccgtcgactcggtcacagaccgcagactagtatgttccacgagacttcgaaggagtttggcgccctccttatcgtgggtcttcataccctcttggtacacagtcatagatggcgtcttgatgtttgtggcaacgttgagaatttccttcagacggggaacaccaagcgtgacgttcttagatgacacaccagcaaagtggaaagtgttcagtgtcatttgcgtcgcaggctcaccgatagactgagcggcaagaacgccgaccatttcaccagggttggctgccgcacgaaggaaacgactttcaatggcacccagtacgtgttggaatgctagcttgttaagcgaatagtctgtgacaagtcggcggaaagcgagacgactgcggagttgcgccttgaacagcaaggtcgcattgacctgagcctcctgtgaaatgggatcgtcaccacgaacgaccaccaagcgttccaggagctgctgaacttggggaatgacctcagcggggtgcaaatcactgattgtgccctcgcgaatacggaaagtagttcgggccatttccaggatacgctggatattaataggaagctgcatcatctcctcgtcctctttgaccacagaccgcaggaattcacggtctttcagaatggcctcccattcttcgtcgaagtatttctgtacctcgatatcgccggcaatttcgttggcttgctctaagatctctgggccgagggttcgctcggggtccataacatcaacacggaatcgctccctgagcttcgcgtcggaacacttgatgtgatccacacgctggttctcaatgtgggcaccgtcgagaccatcctctccgtagatgaactggatgatatctccgagggagtttcgcacagtgccatcatatttgaccatgacttcctcaagagccttgaccagcttacgctggatgtaaccggtttcggcagtcttgacagcagtatcgatcagaccttcacgaccagccatggcgtggaagaagaactcggtaggagtcaagccacggaggtatgagttctcgacgaatccacgggactcgggagagtaatcgtccttggtgaagtgaggaagtgtacgatacttgaagccgaacggaatacgcttgccttccacggactgctgtccaacaagggcagtcatctgggaaatattaattgccgaacccttagaaccagaccgcgccatttgaatagcgttgttcagatccttgagactcctttcggtggcatcaccggcttcgtcacgagcattgttaagagcacgagaaaccttgctctcgaatgtctcacgcacattcataccaggaagggcctccaaagtgttctcggtggcactagccgtaatctcctcgacttcctgtttcctgtttcggacggcctcctcgatctttttgatggtattttgatcgggaatggtgtcaccgataccgatactgaaaccatggtgcagcaaccagtaaccaacgatggtttgggcgccagtgaagaatttcacacaagtgtcaggaccgtactcgttgaaaatggtgtgaatgacaccaccaccactggcaccgaccgtcttcttcgaaagcataccatacatcagctgtccaccgtgaatcaagagacctccatcattgagagggctgaacttctcaactaaaggcgagccgtctttgtcaacacgcagaaggttgagtccggaggggaaagccatgctaatgatctgctttccagtccagcgaggacgaggcttgatgattgccggaggtggaatcgcaccatcccagtcagggacccacagcatgaggttcataacttgttccttggtgaggaaggtgtcacgacggcagatcttgtaaataccgcagagggtatcctggacaatacccatcagaggaccgttacgttgcggggaaacaatattcttcgggaccaaagcgagctcggcgagctcagcgcgcgcctcttcgccctgggggacgtgcaaattcatctcatcaccatcgaaatcagcgttgtagggactggtaacggacaggttcattcggaatgtggagaagggcataacgcggacgcggtgacccatcatggattccttgtgcaaagacggctgacggttgaacagaatgtaatcgccattgtcaagatggcgctcgaccttccagccatacagcagttgctgggcacccgcacgcttagcgtgacgaagatcaatgcgctcaccgttgtcgcgaacaatatatcgggcaccagggtgcacgttgggtccatttgcaaccaatctctggagcttttcaatattgtagggggtaacaacttctgggtaagtgagaatacgagcagtcgagtatgggacaccgacttcatccagtctcaagttggggtcacctgtgatgacggtacgcgcggagaagtcgacacgctttcccatcaaattctgacgcaaacgaccctctttacccttcaaacgactgcgaagagccttcaccggacggtttcccttctgcatcgccgtgggctggccggcaatgtcattatccatgtaagtggcgatgtggtactgaaggagagattcgaattcacgaatgacatgctcgggtgctccctcctgctcacagcgttgaacgttttggtttgcacgaacgatttcggcgagcttgtaagtcagatcatcctcaccgcgagcgccacttgtggttcccatcacaacgctagggcggacggtcgggggaggaacgggcaagacagtaaggatcatccactcgggacgagcgtagtcattgctgaggcccatgatgcggacgtcttccacggagatgtttcggaagatgttcaatgccatggtaggcgtaatgactttcttttccggttgagccatctcatcctccatcatagccttgctaggcttccatgttccaaccaaacagattccttccttccgaactgtgggctgggcattaccgcagccaccgtgggagcggcccttttgggggtccttcgaaaattcgtcatcatcagcaggcgcgtccgcttcacataccaggacatccttggagagtcgccagatagaatcaaagcgtcgcttgggatcacggaaacggagggcttctgtaaactttgaatcggcctggtatccatgttagcgaagtgaaccagtcaagatttgccatcccaatagggatgactaaccgtgttggccttgatctttccacagttgtggcaaactgtctccaacagcttcttgattttcgtcaaaaaacctacaggggtgccaagagtcagtatgggctgaaaagacgaaaaggaggaacctgagaaatctgttacgcaccgatatggaacaccggggacgcaagctcaatgtggccgaagtgcccagggcattctttcgggccctcttcgcaagtctcgcagttgtattgacggtcgattgtacccaggcgagggtcattgatgcccttggtccgaggccgtaaacgttgatcatcctatgaatacttagcaatcaagtcaccatagcgcataggagagggaagtctcgtcggaaaacaatgcagtcgccggtaagaaaaatgtaggagtcactcaccagtgtttcgggatattcaatgtgacacacactcatgcgcttgatctcttcgggagcaaagagaccaaactgaatttccttgatggtgcgcaaaggcgccttggaataagggaaaaacacgttcgacatgatggcgaagttgcggtgacagaaaaagtggatgaaaaaaggcggagatgaaccagtcacgtaggcgtgtcgtaaaaccggtatcagcgacgaaagccggctcgtaaatgtcgcaaaaaatgaagcgaaaggcttgctcgtaagctagaagtcgaatttacacgtagcgacgatgaaaagaaggtggtgtggaagcagctggccggctgaggccttgggcagcccttgccacgagggcgccggcgacctataggtcccgaacgtcacggagcaaaaaagaaggagaaaaagagcgctgcaaagaagatcgtctttacagtatcttgaagaagtctcgcgatgagaatgcgcgatcctcctggattgtaaaggcggtgggtggatggagtgtcggggagatgaaagggtgatgttctgaggtcgcctcactgggatggggcttgagttttccctgcacgatggttgccgtctaaacggggctcaccgctttggcagaactcggggcaccttcccaaaaggtcggcaacggcagattgactgcgccttccactatggtgaatgaaagcggtgaatggcctaggcatcaatagtaggcatcaatgagggtgggttatagatggcttattgtcaccgcccgcatcttccagattctatggctatcgacaccggcagaaggaccatgcttattatcactacgcctttcaccatattctggagttcacactggatgcttgaacaccagttcttatcctggcctttctgataggctgaggattcacctcgaattcaaatattcatctcaatctacacgcacctagcacacctagcgcaatgaatctttcactggtcgatccatttgtcctggcgcaggaataccctgataccttgacggagaagctgagtatgtgcgactcatacttctagcaatgaacatcactgactgagccaacatgatataggcagcggccatgcgacatgtttaagcttcaaccacaaaggcgactaccttgcctccggacgagttcgtgaaccccaaaccaaagaatatagcaacctgaagactaatacatgctctaggtagatggcacagtggtgatcttcgatatcgaaactaatggcgtggcgcgcaagttgcaaggccacacgcgacagattcagtctctgaggtataatttccccagattcgacaccgatcgaccgaaacccaaaatgctaactccattcccagctggtctcgcgatggtcgctacctcctcacctcctcccaagactggaaatgtatcctctgggatctcaaagacggctcacgagtccgcacagtccgatttgaagcgccagtatatatcgccgaattacacccattcaaccagtacggcttctacaattcccggatatttcaacaactaactttttctgtctcagcctcctcttcgtcgcctccctcttcgaagaccagccagtactggtagacgtctccagcacaaaaccaatcaaacgaatcctcccctccgcccccctccgaccgcaagccccagacggcgaagaactcgacccggccgtagcggccaaacaagcagcgcaagacgccaagcactcaacatgcgtaactatcttcacggcctttggcaaccacataatagccggcacctcaaaaggctggatcaacataatcgaaacgcaaacctgcacgacaatccactcaatgcgcctctgcaacggggtcgtaatcctcctccggctagccagcaacggacgcgacctcctcgtcaacagctccgaccgagtaatccgcacagtgctgatgccagacctatcacaactggggatcgacctggaaccatccgcgataaaactgcacgtggagcacaagttccaagacgtggtcaaccgactcagctggaaccacgtaacattttcatcgacaggcgagttcgtcactgcgaccacattcatgaacccagatatctacgtgtgggaacgcagacacgggtcgctagtcaagatcctggaggggccgcgggaggaactcggcgtcgtggagtggcacccgagtcgaccgatggttgtggcgtgcgggctggagaccgggtgcatctacacatggtcgatcgtgtcgccgcagaaatggtcggcgctggcgccggatttcggtgaggtcgaggagaacgtggagtacatggaggcggaggatgaatttgacgttcacccggccgagcaggtgcatcaacgacggctagatcaggaggatgaagagccggatgctatgacgcttgattcggtggagggggacgctgatggcgttgagccgtttaacctacctgtcttgttggatatcgaggacagtgattccggagacgatgttgttgctgttgggccgggcactatgcggcggaggacgcctgggactagtaaggagggtgccaatggggattcggagaagcctgcggctaatggggcttctaagggtactaccaggagtcggcggcgatagttccttttttgtgtgtctcacttttctttttcccttgcctccgctgttggatggctgtactagcatggttcgcatacggcggcgttcatttcttagggcggagatgactgggcgttgggcttctggttttttttttttcttttggttcttactgtagccaatgaatgtatgacaatgcagccatatcatgatgattaaaaggtctaggtgctactattttaaacagagctgtatttgtatatcttttaagaccggagagagcaataactaatagaaactgccttgacaacataactagctaatggaatctacagctatcaagtacagaaatagagagaaagataagaatacgaagagcgtgttgattccaaagagacatatcgactcatcatttaggtagcaaatggaagtgtcagaaactataggaaggtaataatctgggtatatatatcacaagccgagaagattcgaaatcgaaatcgaaatcgaaatcctggctaaagccgaaaacgccatagatgcaaagtccagcatgcagagaaagagaaaaaaagacacaagagaaataaagggtagagtgagtagagtatagtagaatagaaagaaaaagagactcgagggagccgtgggtgcatagaaagaaaagaaaggaataaaggaagaagaataatcacatacacatcgtgtcagccgtcaatcgcgcaaacacccttgagaagtcagttaaacaatgttcatagtcctgtcggctgttgcgggtggaatctataagggcaacactcttcggggataatatgtctgttctgaacaaaatcataaagctgtgctgaaagtcgttggctccggagcgaacatctagttgcagccccttgcagcagatgcacgttcaacataacgtggcaagtgcatactctgggccagccaaagtctgtgagcggcgacccggtctattttgaattcgatcaaaagcgagtgtagttctcggacaaagccagcactgtcgagatcacctccgatttgaagtactagctacccttcgaccatcatgtgggtaggatccggcttattcctcgacaggttttcgcgcttggtaaatgtgcagaaggttgtatgttttgatcttcttgtcgaacgcttcctgcttgacatcgaatgcaatgcggtcaatctgctccctagaccaagaaagaacccgactgaaaggagccaaacacatcggctggacgctctcggagatagcgagattgtaccagcgcgcgaccttctgctcgtgggaatcggggtgccatgggttcatgggcaaccccacaatctggtggtcgatctcggtgaagcccgcttcttgtaaattcctgatcgtctcgttcgagctgtgggccaggggccgcatagtagcttccgttgcatgcttcaaggtcgagtaccagctagccatagcacgtcccggttcaccatctttgtcctcaacgcggggccggaaatcgatctcgacctgctcaaaccaggcgcccggccggagatgctggaagacccgtcggtagagacttggccaatttgcgacactcccacatcccatctgcatgtggatgatatcccatgaatcctcgcccatggtccagggcgcttcgaagtcgaacggggcgtagaaatcgcagttcttcgggacattggtcggttgtattggcgcaaggtcgacgccgactacgaaggaattcgggtatttgttcgcaatctcgatgctccagatacccgttccacagcccaggtcgagaatcttggacccggtggggtgtggtgcatagagcaagccatcctcggcccgtgcaacggtgaacaatttgtggaatatgtcgagacggtcctgttcttcctcgtcgcacgggagagggtagattcctttccggtagccatggtataaccggccgttctctttgtgaagcgggtatttctcgggtatcctgtgagaagaggtcagtcatagattacacgattgagcatggagtgacatacttgtgatcggagagtatgataggagacgatcgcgacacttgagatgcgttcgaggcgtgggatgcctgtgtggccaccgatccattgctagcaaagcgagcgttcctgcgcggatctttatcgaccggatctctatcgatcaaggtgtacaagtccatcgcggaagacggttgtcgtgatcggactcggtcacttcctgccaaggagtgtgaatagtatctggagtggcctgcatcactcgcggaggttgactcggacttgtaccgtttgggcgggggtggagaatgtatgggaggcaggtgtcgcagcctggcatccccgttcgtaaacattctggcgatgtggggtcagactgtaaggcaatgtgttgctatcggcgatcaatcaatgatggcgcaagatatgtaaggcggtttcagatcgacggatcatgccaggtataaaaataaacaagaataaaagagcaaatcagctgcgcgcggcgaaaagcgcagcgtaagcccacgagcaaatgatgagctcgggttaaacgagaggttccggccgattgcacggtcgggcgaagctcagagattcgagattcccaggaaccgagcacaaatcacaggtcgatgtgcagtctcagatcaggtccaactctatttcctgcaagtcctcagaaagagaagggaagaggagggttttaaggttgtgaagctgtggtttccttcccgtcgggcccacggggatagcggggtgcgggtaaagcgagagaataaaaagaagcagacagggatgaggatagatgaaggggaatgagaagaacttgcagaacttgcagaagtacaaagggaaaagtacgacccgcgctaccggtactggctgttgggttgggtacgggcgtttaaaggatttgttcatgaatagttaggtattgacaattcattattgtacgaaataactatacggataactactagtaatcatattatattacctacctacaacatacaccacaactacaacatatgtagaccttatgcaaggcatcccagagcaatggttgaaggaaggctaaaccaattagggcttggttgatcctggtatagtcttttgctctacttttgcttcttccagttttgcttttgctttctttgcttttgcttcagtatacataattcaactcctcatattcgataccgtaccctccgtacactccgtacccccgtaagagctagatcgacgtggaccaaaaggcgacccacgccctagcgggatgcggaccgtctgggcctctcatttccagggattccacttggtgagggcccaacggagtggtaaaaggcgtcgagttacttatttggtaacttagggtaagcgtggcgctgttacttgctgtactgtattctggtatactatactaggtacactatgtactactacatatgtatcaatatctacatctctgtgccacctcaatacaacatatacctatgccctccgactcgtcatacaagtcatcttaaaagaaccaactcgtacaacgtctgcatggactgatgaatctcccctcaccgcaacccaaagccctgggttcgtggatgccacagtcgagcgaatcaagtgagataccacctcttggcagtaagctgcacctcggggtaatccatggatttattcgtttgtgatatgtaagaatgaccccaagaccactgcactgggtcctgactcgtgtcaagtctgttgtttgatttcctcccaaccctgcaatctatatacatcccctactgatatctgcgttctacgtgtcaacattcccatcaaaacgatagcccaagatgtttcccctttagaccattggcttcccaggccaccggttccaccctggcccgagcgcggatttccgttactactccgtactaataaaacatctcccggccattgttggggatctaccgagtactagccctcttcataggttcctccgtacacagaaatcatcctagcgccggtcaaaccccgagcgcggtgctctccttgcagggtacatcctctgtacgggaatatttcagagtccgtgctgatctttcctgtcattgttcaccagctcgtcatggaggattgatcgaccggcctgcgcaacccacacgcttgggactgacagaccatgggattgggcttcgcaggagtagtgcattgtctcggggggactaacatctagcgtatggagtacgtactttttttgcccctgatttttgaataggagatctttttatttcgtttcacaaagaaagccaaaggattattcttcattctatcgctatattttatattgagtacatgtatgtacatatgtacctagacagattaactagtgaattactccggactccgtaagaactacaggatgtacatcgatgtgatcgtactccgacagatattggccccacgtcccgccagaaaaaaaattctagccaaactccgaacctcatccaaacgaattgattaaatttccacgctaataatacataaaaccaaaaaccagtacacagcacatccatcctcggagataatcgatcactcggaaactaatcgctgcccctcgcatcagccacagcgggatcaccgatcaccccagagatcaaaacatttctatatcaaacccaaaaaatccagccacactgcagacaccgggactagcagctccccgggaattcaacaatgcacacactcaaagcagtcgcctcatcgactctgtcgctgccggcggataattacatctactccatcgtgccttcggcgccggggacattcgccgccatctcgtcagatgattcgctgcgcatgtttgacgccgccgatctcgatcgcgggtccgtggtctcggctgctagtcacagcggcggcgtgaccgcgctgcgcagcttcgccatgggtgagtcgcacctcttggctacgggtggccgcgatgggaaggtgaaagtttgggatgttcgggctgggaatggcagtccggttgtggagatggaaacgggtgagtttgttccagttaagctttttttttattgttttcttttttggattttatgcattgattgcctctttgggttgtcttcgggaacctgctggcacatgtgcgttttgtgttttggtgctgcatttccgctggtcttttactgggtttcggggaatttttcggcgcttgggtgcaagggtggcgatggcttggttggggttgttgctgctttctgattaaatgcttatttgctaatacattgtcttatatgttagcgaaaaagtcgccggttctgtctgtcgcttgtaacccggagacgaacactattgttgcggggacggaacttgtctcttcgcaggcggttgttgcattctggtatgtttcatctatacctcatttttatttcttaggcccagttttatcatcgataattgcatcgggatatgtcagacaaaaacagctgtgccagacccactaactcacacagggatatccgctccccccaagaattccgcctccaatacgtggagagccacaacgacgatatcaccgaggtaagtgcacctccattaagaatcaagattttaagcccaacccaacatacccaacacctactccaaaccccacatgcagcaccagccagactaaccattacatcggcaccttgcctgttaccggtggtacacagctccaatatcacccgacgcgcagcagcatcttactctccggcagcacggacggcctagtcaacatctacgatacgaccataaccgacgaagacgaagccctagtgcaagtgatcaaccacggctccgtacatcatgccggcttcctgtccgagcgcaccatcttcgctctcagccacgacgagcacttctccgtgtacccagccacggacccagacgatgcctcgcaggagcccgagcccgtgcatttcggtgacgtgcgcgacccgctaggctgcgagtatgttgcgcagctgtgtttcggtgcgcagggaccgtatattgccgctgggaacaagatgtatgtttatttcttgttttgttttgttttggggtttttttgtattcgtgctcggaagacgaagtcggacaggcacacgtgctgttgtgtttggggtttcgtgggctgggctcgtgggtgtttggatttgctaactatgtcttgcagtgacaaccgtctcgatcttgtcccacttatttccagcccgtcgtggaagctagaccgggataatctgtggcgcttgccccgtgctcattgcgaggaggttgtacgctcggtgtatttggatgaacaggtaagttttctaatactaattttcttgttgtgtgttatatctgttggcctgttcttggctttcgttctttataaccctcgctaatgcaattatatcctctagagtcagtccgttttcacctgtggtgaagatggcttcgtgcgagcatggagacctgcagaagagagcgatgctccagtccagtctggttctgcaaaggctcgcccgaaggagaagaagaaggataggttcaagccgtactagtctgtgtactgtgtgcgggtgaatgcatctgctgctgacggttgtctgttgtgtatcgttgggtgtttggggtgggtaaaaatagatctgcaatttgatgatatgagttatgtctttattgtggaattgctgtgcgtagaaaaagttggttgttgggttagtagtctacatgtggtaggttgagatatattactggaccatgacctctgttagggtataatgttgaattgaaccacgtccattccgagcaccaatgagcatgatttatatggttttagctctggttctttttctaaatcacaaatcacaaaaaagaaaccaactttgaattgaagaaaatgccaaaaaggcgcccaggattaagctctatcgaattgtgaacgagattcataattagtaagcataaataaacagtcaatttatccctacacaacctgacccttcaggtgtcgaatcttatctccaacatttttttccgtatcaaaacttttcttgcacaagggaccaacaaccataaatcccctctcctccaattccacaacatacatacatacccaagtcagaatctcacacccaaaaccaaaaaccaaaccaaccttcaaacccattacccacccaaaccctccatccagagcaaacacaagaaccaccaccacaaaatggacgcccaagcctacctaatcaagcacggctggtccggtcccggcaacccgttaaacccaaacaaacgacccggcgcacacagcggcctaggcctaacccgaccactgctcgtctcgcgcaaaaccaacaaccacggcgtgggcaagaagacaaccaaagacccgacgaaccagtggtggctgcgcgggttcgaagacgcgctgaagggcgtcgggaacgacagttttgaggcgacctctgcgcgcgagaacaatgcgctgacgagcgagctttatcggcattttgtgaggggggatgggctggctgggacgcttgaggggaagaaagacgagagcgcgtctacgtctacgtctacctctacgtctgccgcttcctctaagtcaaagcgcaagcgggaaaatgaagacgagggcgagcgcaaggctaggaaactggccaaggctgcgcggaaggtggagaaggcgcagaggaaggaggcgaggcgtgtgaagagggctgcgaaggcggagcggaaggagaagaagattgctgggaagctcgcgaagaaggctttgaaggagaagaagcggactgcttctgaggaggattacccaacgcctaggtctattgaccaggaatctgatctgactggggcggagactacggggacggatgaagctgttgcgcggttagaggagaaggcgacgaaaaaggaaaagaaggagggcaagaagaataagagcataggagataatgggggcgctgaagactcgaaaaagaagtctaaaaaggagaagaaggataagaaggaagctaaggcttgatgtgtccatttcgttgtacgcattttgatattgagcgcttcacatgcatgtcaggaccaggtacaaaattctgcatatacctgtttttctcttacgcctagaaatcaagataccctttttgtttggcgaaatcttgactattgcaaccataggaaatgtagaggtcttttgatttgtgttggagctaagctacgctggtaattttccaggagtacctgatagaatccacggtcgtttctcccagaactcatctttgatgatgtcgacatggtcaaccacgacctgtgctttccggcgcagtttgcggatcttgtcttgctgtgaccttgactgcttagattcgaccaccagtgattcttcgcccgcaggtgattttgtaggctttggttcctctagctcgtactgtagagaaatattagaacggccgaaacagaaagaaacacatataaactaggacatacctggcgataaagaacagtgccctttttatagatctctagctcgttattgtagttaattccaaaccgcttgaagagaatctcgttcttgtcggcggatacagtaccctggtatcaagtcaattgcctgtaattcgaactgaaagaacaatagcatacctttagctcttgctcggcgtctgtattgctcattccgccttgcaacaccattgtccagaaggtagtgttgtagaggttattgatgtgacctagtgatattgagttagccggatgtagtccgaaaagggaattgggagccacttacaatcaacctgtctccagctcatataatcgcggagaatttggttattcgggtagatgaccgcacgcccatcgaaagagggtagatacggtggcaggagaggtctttgggggaagaactcgctccatttgtaaatgtagtgtgctgtgaatgtagagacgatggtggtaactagtttcctggatggaagaggttctatcaatggccgttcttataccactgagatataagcaaagaagaaatactcacccattacgccgctcaaaaagttggcagttgggatgaaagacaaaactgaaggaagactgttagttaatgcaaggatagcgatgaaacgagctggacatacctgaattcgtcactgactccataggcgatacataggtctggaagctctttcatgacctcaactgccgcagcattcatcagatccagtgcccggcggtcattgggtttcgcgaaagcgtagtgatcagagagtctatataggttagactccgaacagaaacgagagcatgaactagaacagcagtcatagcatcatatcttggtgagatatacgcatagaagacggatatatagttgccattttcttcttctatgaagattcctcatgcaaagggcattcccaaataacaagacatggagactcacttgtgaaatcctcgtccatcaatgcggaccacaatccacgtactggggagcagcacgtccggctgctcaaaggacttgacgtactcaaatctgtgttcatttagtagccggactgaaattttctagaatttccagtgcttacctagaatttgccattttaatctactggactttgatgttaagtgatgaatgtccagagattgaaagtgtcattttgtgcgatttctgcccgcccgcatttgccccaactcgaaggttttagaatttgaggacttgaagtgatttgattaggataatgcaataatttcttgtgaagaccagatatactacaatttctagatacatccagatgactatgtaaaatcaaaaatccgcaaataaaactaatatgttgttgagatgcatatcaaaaaccttcagggaggatgcttaagaatctaggaaatgaaagtgaaaggacaaaccaagatggtctatagataatgtgagatacatgtgagaatcatgaattctcaatctcaggaatctcttcatcgccagcttcactggctcgctcgctagtctcgctggccttgtcagacttgcgagacttacgagaaaagaatcccaagctgctgcgggttgagcgatcggcggaggtcacacttgagacagtgctatcgacactcttgccgagctgcgcttcgctggtggcatcctcgtcaatatcaccttgcgaggattcacctttcttagagaaaagtcccgagcgatccttccaggagctgaacttgctggaactacccttgcgcgtgatcttgcgaatgaacgactccttggaggcattgtccaaggaagtagcagatggcatgcgctccaacgattcataggaatcgccagtgaaaagggatacggagcgagatgtgcgagactccgaaggagatccatcgaaatcgtgaagaccaaagggactttcgggatcattgcccttgtctgtgtctatttccgacttctcgcccgtgagaacggccgtgaatgccggagcagcaggattcagctttggggtcagcggtcgatgagaagacgacggacgagtgccaatcggtgcctggagcggtcgatgatgacggtcaaatgtgtcccccacgaaatcaggctcgccggttagaccgagaggaaggtgtccggacgatccatactggattgaaggtcggcgagaaggagctcgagaccaattggatggcgcggcccagtcaaacccgagcgggctgttgcggtgcccagcattatcagtcgatggccacccgaaatggcggttgtccgtcgaggggtgtggaagttgatttggtgtatcgaatgaggtcgacgaaggtcgcggggacagagaaccgcgccgaacgccaccaagaagcgatgatggatcaataggatcatgtcgcggactgaattgattgtatccactgctaagatcgggatccccacgggtgccagcaccgccgaagccaaacttgctggatgagaatatatttgagaaagcagctcgccgagagggcgcatggtcagaagagctgtccatagtgacaccagtcgtgttgcttcgagggaacaatgacattgggtttgcccagttaccggtatagctcgatcgccgccggcgtgcaccgattggatccagctcgtcaatattccgagggaaggattgactctgaccgggtttcaaagatcccagcataggagactcatctgccagggttttcccacgaggccggtgaaacccgaaaagaccagaaagctttcgcgatgcgcttttcggggcttccccagcagtagacaaatgagcaccttgggattcatcccgccgattttgagtctctagtgggctggcaaagatactgccggctcgactgtccgaagagacaggcgatgctgggccgtgaccgaagctatctaaagtagtactggtcgcctccatggttgcaaatctgggacgaattatagaccgtgggaattctggcgattcctcgtcaccaaggagatcggatggcaacagggcatccgcacggggactcatttgcgggttattgaaagcaagttccgtatccgagcgcatgatctcagggggatcagagaggcctgtaagggccataccgttattgatattgaaaaacgcagagctcggagggaatgtaggcgagtgaccggacgggttgtagttgacgctatttgaaaacgaggtttcgactgccgggaagttcagaggggaagacatattgctgttgagtgagctgcgatggcgacggggccgaatggtggcaatattcgacatgtcgagatccaaggtcgggaaggcaaagggccctgagctgccgggtcgttgggcagtgagccactttagacgttcttgggcttcttgatattgttgctgggcttgcgcgtgcagattcacaagtgtggcataacgtgcgtgtaggttgcccagcttgtgctcccactgacgagctcgctcgttgtcgatccgatccagctccttgccatcttcactatcgccttcttgtaatcccattctttcttcttcgagcttcttgacccgtcctcctttatcctggatctcatcgtcaatggtcttcatctccgcctgttcttttgcgatcttggctcggacctcatctgcgcgcaccgccccttcttcttcaattctggccttgtcatcctttgcctgtatagcatcggagttcatgcgtgaaatcttctcctgccatcgcaagatgtcattcttgcgcttcttgcgctccgcctctttctgctgaaggagtctcatgcgttttgacttttcgccctgtacagttcggttgacgctctcgagcttgtagacatgctttttcaaatcgccacttgcttcatccttctccctgacgcgcttccgcagttcactgcgctgtttttcaagatccttcagcagtgcaatatgctcttcttcctcctctgccccctgcttttccacattctcgttctcgtgctgcaatgacttcaagcggtctgccaattgctccaaagtctcatccttggcagttctggctctgcttttgagtgtctcttcgaaattcccgtgtgaaacgtccccagtcgcaggtgaaattttccgtccggccgagggccgtttccccggtaattggcctgcgctatgctcacgagacattatcggggcggatggcgtcggcagacctactgtagacctggggatcgatgcgcggataattggacccccggcgctgccattctgctgggcttcggacagcggaagagattttgttcggacatggaggatcgcactgggcgtgtggaagtttgcggcactaacggaaagaacacaaatatgatagatgttacccggcaatagatttgatatttccacagctgtttctgctcgtttggattcaccgactagagactgttagtgctttgtttagcgacaagaagggattgtatgtcttatacctttcgtgttattcacttgaattatatgcttatgtattgagttatgaaagtcgggctgtttccaagcaagacggatttcacgggctgtgatctcttcgagggtgacctctggcggcggaggaatgtcgagaccgagtttctcaactaagacctcatttgaagtctggcagacttgccaggcacggtagagaagccttgataaattgagtcagctgagcaaagggaatgctggaacaaccaagggacttaccagatcaaagcccacaagatcgagacggcgagaaagagggccatgacgcctcgcactctcacgcgagggaccactgctgggtaagcgtcaaatgcaaagtataggggctcatacatcccaacgtctgtaacccattggacgtgggcagcgggatacaggagaattgcaaggatcgccaatgctctccggagtgggtgggataggcacgtgacccggaatattagccacccaaaataggttagcgccacagcggagatcagccgctacggcatagaccgcttaaacggagtacggcctctatactttgacggtatgatttacagcagttgcaatttcatgattataatttgtccgatatcttaatattttgagtatattttggatatttgaggtatcttttgagatgtctttttagctgtttgcttaatttatctagaatgccttctagatgccttctcagttccaacccgtggaacggctgtgtgagcttccatatgtaagcatcgtctcatagcaatatcgtggcgtgctattaaggattttgcctagatgatggttttatgttgtcatttgccacttaagaaagaaacctcaagcctatgttgtacactctataaatacgtgtctatagttcgcgtgtatataccaaaccttgaatctactaagacgattatgttatatcaagacgttcttccttctacaactccaacatacgagtataagggaatccaggattctctccagatcctagaccgggagctggaggattcatctaacccttatattgtctttattattgatgagcgttccttccttgattgttttgagaattccgaagaaggactacttagaacatcatgggatacctacgacccttctagcaaccgtcttgttgttaggaagcagaccataacacattcatctgcaagcggttcttttgccagcatatttagttcttggcctaaagacgacaattaccgacttatatcaaagcatcagtgagaggccagtcggagatgaataaacaggaggattactcatggaccctatacaattaggccgcttgaaggaatctccgactatggtagtcgaaatcgcgtgggcagaaacacggacaaagcttgtggaagatatgaacttttggctatcctagtgttatggagaagttaggatcgcactctcaatcacagtgcatgctcgtggaaagatcacgattgagaaatgggagcttcaaggcgcgactcctattcccacccagaaaatggagatcgtatgaaaacccgcaccaaaatgcgagaggatccaaggccacctccacctcgctcttgaagatattaatcttcaaccgaaaggggaaaaagacacagatttcatcctgacaccccgcgatatggaaacacttgcaaccggggtttgggcttttcagtttgatacttgagcttccgcgggacaactggttccgcgttccgaggttgtccgcctgctccaagtgtcacatggttcagttcaacttccccgattctccaacaacttggtctcagtcttcttctttttgtccctctgcatttctagaatttgcttcggattggaaaacttcactcccagctgtcaaaggtgctagacacccatttggcgggatgcagctctatcgctctataagcggttctgtctccaagacatggaattctatcaatccggccactcttagcggggctattgatgtcattgtcatagagcaagaagatggtatttacagttccccgagaggcgaaattcacgataactgatttggcttttctcttcaaggcaccctcgcttgttcgccctttcatgtccggtttggcaagttttcgctattacgtccattcgagaagaaggtggagttcaacgtgaacgggataaaacaagaatatgccatgaaattaggagagggcggcgaggcattctttatctttgaaacgaccgatgacatccccgcatccttgcagacctcgccgttggtatctccagcagccagtccaagagcccagagcgaaccggatcttctaccttcgctgcaggaaccagattaccttgacctagataaagaaagcggggatgcattgtcggaaggcgcaaagaccccgccggcgatggggatgccgttacgggcaaatacggacatgggtaagacacatctccaacacttagtttcgatctaagtccctcgactgaccgtttcaatagggacaataacacccttatcgccatctctcgatgaatccaacgtggcccgttcacggcacggttcgttgagcgataaaccgctgcttgatcatacactctcggaaaacgtgctctcgaccagctctcctcaacaatctctctccggccaatctgcaaatgggaatgatgaacctcgtgatattgatatcgagggcgaaacacagcgccctcgtagtcctcctctgtctgcccaggaagcggtctctcgtgcaatttcgctttcaaagaagctgtctgggtctaatattccatcacatgtcaccgagaccggagatctaatgttggatatgactggctacaaaagcaacgaagaagatgcccttcgcgcggaggttgttgcacgcaagatccttgcagaagagcttgaaggaagctatgatatcggtgcactgattggagccgatgaacatggtaatctatggatatacagcagcgaagagtccaaggaaatggccgatcggagagccactcttcactccatgcgaccaaacatagcgatgagcgatgatgctctctccgacccaggatatcatagcgaaggcgaaaacgctgttttggaaccagcattgactacgcgccatcatcgaaccaaatcagatgttcaacccggctttcccacacccccagattcacctttgcatgagtcttaccccattgaaacccgcaactatgccaaaacacttcgcttgacaagtgatcaacttaaggccttggaactgaagcccggcgccaacacaatgtctttcagcgtcaacagagcaatttgcactgcaaacatgtatctgtggaatggcaataccccgatcgtgatttctgatattgatggaactatcaccaaatcagatgcgttgggacatgttctcaatatgatcggacgcgattggacgcatacgggggttgccaagttgtacaccgacattgccaacaatgggtataatattatgtatcttacaagtcggtctgtaggccagactgatactacacgagcctatcttcacggcatttgccaagatggatacagactaccaagaggtcctgtgatctgcagccccgatcgcacgatggccgctctgcggcgggagatctacttgagaaaacccgaagttttcaagatggcatgtttgcgggatattctcaacctcttctgcggcaaagagaatcccttttatgctggcttcggaaatcgattaacagacgcattgagttatcgttctgtgaacattccgtctactcggattttcacaatcaactctaatgctgaagtgtctctggatttgcttagtctgaataagtacaagagcagttatgtgaccatgcaagagctgctcgaccatttctttccaccaaccagccttcttgtacacgacggtggcgaggaatatacggacttcacatactggagaaacacaccgcatgagattgcagacttctcgtcaacagatagcgaggatgaagacgaggaagatgtcgaagaagaactagccgaagaagaagaggaagaagaggaagaggaggaagaagaagactacgatgaagaattaagcgagggtgaaggcagcgagtaccttgatgaggctgagttggccgagggcgatctcggcgcaagctacatctcgcaggactccgttgccttgtccaaccaagcagcctcaataattgaggcagtggaaggcgatataggtgccgaagagggggctatcggtgaagaggaattgtctcccgtcatcgagaaagcacaagaaacaaccgaaccgagcacaaccgaacttcccatccggtccaagatgccgcaaaatctttgaacatacacccaccactatgtttttgctaaggcatcgatccctgggcatttcttgcgtcatagatacccgtctgcgagtgctttactgagtcagattctgcattagacttccctgacagcgatatatccacgttcaacactatttcatgcagacatggagttggggactacattatacacggccgctcgtgcccgactctttttagttcatggcgtttctccatttgtttttggtacattcatggcgcacatacataggatcatgagaatgggatgtaatgaatggaacaagtgaatagtcttgctcaaacacaatgaagagcctgatatattatccgagggtgatctacaatctaatatagtaaaagcattatgtagatttgaccgtttgttaaagtgatttagttcacttgtgactgcaggcaggcgacgcgattacctaagcgtgatattggctgagccctggagctcatgtttcttttcggcctcatttggccatcacttactctctctccatcacacattaaacgctacttgcatctttggctgtttcctagcctctgagaattgtaccaggaatgctgcccgactacatttcccaggccgtctaatcatcacataattcaacatcttgaccactttcgcaacagtgcaattcgctctttctttcctacttgatctttgatcagcaatccaagataaaatggcatccccaagccaaccacagggccaagcacccaccacacaacctctcacaccacccgccgaatcctccgccacgaacgggacctccgcgcccgccgcaacaagctcccacacccaaccccatgtcccagcaacgggcgcttcaacaacagcaccacaaccgcctgcagtccccgggatatcaacccaggacagcggaaaaacgcgacgaccaagggacgtgcggctggtccacatgctcctcgcctcactcggggtaacctcataccaagaccgggtgcccctccaattgctcgacttcgcctaccgctacactgctaatgtgctacaagactccgtgcacctcgcaacggaaggatacgccgcggcaacagacggtaccgcgggcgcaaagggctccggcgaagtaaatagtgtttctctgcccgcgttgcggctggccattgcctcccgcttgcacttccagttccagacagggttgccgaaggagttcctcatggaggttgcgtcggagaggaatcgtatcgctttgcctggtgtatcgcggggattcgatcctgctgctggtgttaatggcgctgttcctgcggcgaatcagagtgttcttattggtggcatgcgcttgcctcctgagcgcttctgtcttactggaatggggtgggatttgaaggaggagtgggatagtgagggcgaggaagatgaagtgcttgatgtgatgcaccagcctgggactgggaagggctttggtggtgatggagctgaagataatgaagacgaggatgataatgatggcaagatggaggatctcttcggcgaagataccaccatgggcgaggcaggggatggagatgaggaccggaagatgactgatgtttaagggagtgcatttacgtcaggggcttcttctgtctttggtctcgggctggtggtgtttctggcgcttggtgttgttctcatttttctctctaatctgccatcggacagggtcctggttgtactatcacggagagcatctatttcatgacttgtgtctacaaattggggtaaaagtcccctcgcctgaccatagaggcaaataaaccgataaagaagacaactttcggtcaattaaaccaagatatgcaatcgtctgtgtatattgtacataatttccatcccatcgctccgcattcgggatgatcatgcaatgtaataaagatgcccagcaaaacgcctgctttgtttgcctgtgtgcgccgtgaggagagagagaaagatataaggtccgagtccgagttagccaggaaagtccagggccgacatccccggcgggatcagtctgatatctgtccatcaaaccgatgacgggtagcaggccgggaggggctgccggactgtaacatgcaagacccagccaatcaggcagtcaggccaggaagagtccaacagctctttccccctcgcccaaacactcagcccaaagaggaaaatcctcgcatcccgacctcggagaaacgcaagaagcagaatactcaagacgccgaaacccatataaacaagaaatactcacacaagaaatgaagagaacgggggcgggagggatacatggagtaaataggaagagctccaatcatttttccgccgctcgtgtccgcgcctcatcctcgcgcatcatgcgaataacttccgcacgacgcttctcaacccgtgcaagatcatcctcacgcgcgcgtcgccgttcctcataccccgcgaaccactcctcacgtgcgcgatcctcttcttccggcttcgcgtgggcgaccatgcatgaattcattgcgagacgttgctggcggcagacccatgttgcagtgacagtgcggttgacggcgcactcggcaaatgctatatcatagttgggttagttggttgtttcagacatgttcgaggtgtggggagtggatcatggtcatgcgagccggagttgcttctccgcttgaaactcatgaccggcttctgcaagctcaagctatgcactatttggaaagaggtgatgtatttggcgtaggaagcaacgtgaattgtatacctttaatttcgggtgcgcaatgggcgcgtactcgcttgtagtacagcagtttcacttcttgttcttggggggctgagagcggaagcggattgcgaagattatattttttgggtgcacttgttgaagaggtatcgggggatgtggaagacgtagccattgggactgtagatcgatctcaagatcgaaattgacggggctgagtgtatggactggtcgaccggagagtttgctttgagggggattggtcccggttgttgagggacaagatatgagttcggctgctccggagcctaataaaacgaatcgaagaggtagaagtagtttcaagaggggttcatcgaatggctttacagagaagatcgaggctaggtgggagtgttgattgcgagtgagccgagctcgggcggagagaatgttagttactattggcagaatcagaaaaaaaagttctccgactttgcatctcgatacaactcttctgttagagacatctgcgtcttttcgctctttgcgtttttgtttcttctacactttcttgtgctctatttattgtctcgggaattatcaacatcaaaactcagcatgtcgtccatgcgcaacgccgtccaacggcggaaccacaaagagcgtggccagctccagggccgcgagaaatggggtcttctcgagaagcacaaggttagttcctgagaaggaggtcttggaatattttaccaatgattcaagctttctctcatgcgtagttttaagacaaacattctaacttcaataggattactcgctccgtgccaaagattacaatgccaagaaggctaagctgaagcgcctcgaagagaaggtgcgggatcgcaaccccgatgagttcgccttcggtatgatgggagagaagaaccggacccagggtcggcacggacgtggcaaaggcacagcacgagactctgccgcagcgcagggactgagccacgaggcaatcaagctgctcaagacgcaagataagggttatcttcggacggttggcgagcgggtacgccgcgagattgagcgcctggagcgcgacgtgaaattgcaagatggcatgaacaaggtccttggcaaaaaggatgggaaaaaggacgagagcgacgatgacgggtttgacgacgactccgatttcgatttcggggcgccggtgcaatcgaaaccaaccagggtggtgtttgccgatgatagacaagaccaactggcaatgaagaagcagaagatacaaaaagaagaacctgcgctagattcagaggaagaagagcagacgtcaagcaagacccgcaagacacctaagcagcttgaggctgagcggcaagcacttgtggatgctcggcgggctcgcaagctccggaaacgagccatcgaggcccgacacaacaagctgactgcgttgcacaagcagtacgccgagattcggaccgcagagcaagagcttgattggcagcgggctaagatggaaaattccgtgggaggcaccaacagggacggaatcaagtggaagatccgtgagcgcaagcgctaagtgtttttagtgttttcgtttcgacggagtttatgagtgatgactgcttatcatcttttttgtacatattgataccaaccaccatagaggcagtccggcgcatacagtagcatccaaggaacccacttcagtcttggccatcgactcctggaaaagctcgataacatcaagcctgtctcaggcattagctggaaaactcgtgacaagacatcgccgcttatacgggtagatttgaccatcatatcctggctatatctacatctaggtgtggttagttgttgaagtaatatcaacaggttctctttttgtccttctgtccttctgtgttaaattctgaatgaatgtctatacacattccacaaagggtccaattctgtactccctacaaaccatcaaggaacatcatgaccgatatagctatctcttgagcgagtctcatacagcaggcttacaacgtgttccgctgaagcgggcaatatgtgtggtctcattaccgcctagttcaattccatccaatttcaacatcatttgcgcatgtactgtattgctcggcttcttacattcaagctcccgcttcttgatatcagctgtctctgaaaagggccgtttgtgaatcgaggtttggtccagtgatcgggatgcgccttgagaagcgtttctttttctcttaggtctatcttcaaggacagcctcctctgaggaattaggtcgaccgagtgattcatattggtgactcttgactcaaattcaattcacgattccatcttaacattggagtatcgagtgcgtctgaactgccgagtccggattgagatgaattgaagcgatcaacatcaggtttatctgagatgctttgtctcaacgtgagtgttctccgggtggagctctagttgtggcgaactatagaaggatgagacatatgcagctatgtacatgtggagtaaacccgaaaagaccatgtgtatactgcaactgcaaacaaagggatagagggaatgaacgctaaatcaagtccaacatcccttgccatatgtgtaggcgggtgcgattgcctacttaggaagaagagtcggtataggctggtcatgtgatggagccttcacagtgtgccatttctaagattaacgccacgattgctaagcgttgtctctgactggcatcggaatgatataaagtgtactccgagactccgttgtcgcaagagttctaaaaccttcaagtaatcacgccttcgctgataggacaatctctttaactaatcgacaagccctggagggcatccacaaggcttaataatcatttgccacccctccaaagaaggttatcttctccagatctttttcttttctgcacttcatatctcaaaataaaattcacaatggctccttcatttatgaccattgacaccaacgacatggacgtggatttctcctcgcccaagccaatccacgcaaagcgcaccctcctcctggcacccccctccatcgccactcacgaggacaaactccgcggcctcttcaacaccttcgaccgctcaaccacagacctccaaatgctcgaccggctctctacaggcgtcgtctcccttcccgcaacaacatacgacctcgtcctcatcctcaccgacacagacggcgcacggcgctccgaggcgctgcaactcctcactcgaaatgtatacgccaccctcgtccccgccatgaaggccggtgccaagttgcaaacccaagactcagcccttaatgcctcggacgccatggaggccgtcctggccggcctcgtgcagtccgataatggcttcgagaaaccaaagtttgagccctccgccgctgtccctttaaagttcggtctcaggaagaagaataagcctaccccgccaaccgcagtccctattattcccacaggattcggtgcgccgatggggattgacgcgcccgcgactaatcacgaccgcgacgatgacgacgagctcattaatgaagatacgctcctctccgaggaagatttaacaagacccataatgccgcgtatgtcactcccttccaaccatttcatttctacaagacctatatcatctaacaccatcctcttcagccccagagtgccaacccaagaccggtcgccgacgacgcgcctgcaaagattgcacatgtggtctagccgacaagctcgaggcggaggataaagagcgccgtgcaaacgcagataaacaattgaacgtgatgaagctggatacgggcgacctgaccgagctggacttcaccgttgagggcaagactggttcttgtggaagctgtgctctgggcgatgccttccgctgtgacggttgtccttacatgggtcttcctgcctttaagccgggccaggaagtccagatcctgaatgatattgcgcagttttgagatatactccctatttcacgactgtggggttcccttttttttttttgaagtgggggtcttcggtctttgcatttctttgagcattcttttcgggatttgttttttttttttgggttggttttatacaaaattatgctaggggcgtctggctttcattaatttgaatgattttttttactagtactatgagtactatctaatcatgactcacctgaagatttcgaccgagtggatccccaacgtcatgtcttagatctgatagtgggatagatcggcctagtatacagatgtgccgttagtctgccgataattaatttactttactttatttacttgatatattctaatgattggctgtaataatcaattctaaacccaatggcgactaatttgcattttaatgtatctgtgttcatgccacgtccaatcatgatagaaccgaaaagagaacgtaacccaaaaaatatgtcttatctgacctatgactgattcttcttcatgtgggcaacacggatgctgacggcacgcttgtgtgcctccaggccctcgacagcggcgagagtctctaccgtcttggcgagaccgagcaggccgtcggcagtgaggttcgagctagtgatgtgcttcaggaaggagccgaggttgacaccagagtactgcttggcgtagccgtaagtagctggagagggatatgttagcaagattcaattaggatataagggaaaaagtcgttgctgagaaatacttacggagcgagtggttgactccggcggagtaatcgccaacactctcgggggtccagtggccgataaagacactgccggcgttctggacatccttgacaatagactcggcgttctcgacctgcaggatcaggtgctcgggcgcgtagtcgttgctgagggtcatagcctcctcgatgtcacgcacgacgaaggtgacggagtgcgcgagcgagccgcgaacgatatccatgcggggcaaggccttggcctgggcatcgacctcgtcttcgatggcacgcagctcggcctcgtttaggccggccgcgatgaggattacttgtgagtcgatgccgtgttcggcttggctgagaaggtccgatgcaacaaaggccgggacggcggtcttgtcggcgatcacgaggacttcactgggaccggcgggcatgtcgatgctgacgcctgcggaggtgtcgttggaaacgaacatctttgcggccgtcacgaactggttacccggaccaagaatcttgtcgaccttagtgatgctctcggtaccgtaggccatggcggccacggcctgggcaccaccggccaagacgatgctttcagcgccaaccttgtgggcgacgtagacaatctcgggagagatgctgccgtcggatcggggaggcgaggccaggacaatcttgctgcagcctgctacttgggcgggaacacccagcatcatggcagtggagggcagcacagcggtaccgccggggatgtacaaaccaacacgctcgatggggcgcgagaagcgagagcagacgacaccgggcatggtctccatctggagggtttcgttgcttcccatctgcgcggagtggaagcgttcgatgttgccaatgctgatatcaattgcctcctgaacatcaggggacagcttcatgagttcagcggggaacggcgcatgaataacgggggaggtaagtgatgtagcgtgctcgaacttgtgggtgtatttgagcactgcggcgtcgccgccatcacggacatcgtggatgattggcttcaccaggttgacaatggcttcgttagatttctgagaaggacgcttgaggtaatcggtgaccacctgaggagtagtagaagcagtgatgacacgcttcatctcaattcgggttgtgcgatcctcgaccggggcaggggcaggggcaggggcaggggcaggggcagactcgggcttggccaggccagccttttcagcccaaggtcccttggcgtcgccctttctccgcttcaccttcaagctcttgaggtcaaggttgcgctcgatatcctccaggctaacaccggcagcagtgcacttggttagggcgaagtagaacaggtcagccgcctcgaaagcaatctcatccttggtctccgcacggcacaattcatcagcttcctccatgatcttagcatcgatgagcttaggttcattgaataaacgcgcggtgtatgatccagccggagcatccgccttgcgggcatccaaagtcttttggagacgagacagaccggaagatgcgccgaagcaggtctctgtaccaaggtggcagaatcctaatgagtcaccacgattagtatacgaacatcatccattagtgtaggtagctggttcttaccacgtccaatttgcttgacgacaaagaccaagcagtcggcatcacaatcgaagccaatgcggatcaactcttgcacatccccgctggactggcccttataccacagaccacgcttccggctctggtaaacaccggtgccagtacgcaaggcctcaacaatgctctcatcactgctccaaacaaagcctagacaagctccccgctcatcagtgacagaagtggcatacaagccattggcctggtcagtaacagcggccgacgcgataagcttagcggcagaaacctggccagccacatcccgctcaacggtcaatgcctgtgaggggacaatagcaatcgcgccctgctttgtgacgtttgtaatggcatcctccgacactgtctgagaaccgaaaattgtgaagagccgtggggagtccgagctaatcttcaatttctcggcggcggcgaggacggtggaaggtgtagtgcagacgctagcttcgctgcgctcggcattgacggcgattgattgctggaaagtatccaattgggagtctgacagggcgttgacaagcagacgggaagagggcacggattgttcttcggagagggtggtcagttgatccaagttgatcaagatcttagcggcaccggcgttgaggatatcgacgagatcgccggtggaggagatctcagttgcatcgacgaagatatcgagggcgcggaagttctggcgcaaaaattgctctgcctcggcgagagtcgcgactttgatcagtacgcggccgaagtaggcgatctgcttgagcgagagtccggagccggaggtgggggaagaggggtcgtgggagataaggaacggggtcgccatgatgaggtagatgtagtagttaaggatcaaaagattgaaggggagaattatatcccctaaataataggaccctttgaattaataggggagggggggattgtggaggagagcgatgactcccatccaaggttgtgctaccttttttttttcccggcccgcacccgctgaatcatcgtttgattacatccaactcgacttatcgtgggattttattggtgatcttattttgtgatctataacattttgatctaccgtgttcattgcattttgcattttcacattctataacagatttccattcatgaggtccctggaccatgcctgccttaactatgagccatctcatagacaacgtgatacacagaggtttcactattccggtgatcttgaaacccttgagatatggaatctctcctaaggaaaacttcagccttgggcttttgggtgatcaaaaagcggcctcccgagaacaatgtcagccatgctgtaatagcgcctgtctcctcccgcgatattactgtattcgcccacgggtgtttctcccagtcctgtgttgaaagttggacatatgccatggcgatattgctttttgaggacacgactcaccacctcagatcagtcctgccacagtggtcacctttgtgtctcctaacccggtgacttctacaacaaaattgcacccgagtatggctccattgccaagcatttacatcaacgcattggactacagagcatgagccacatgggtcgaaagacacggaggatcggattatatccgttgggttttgtgccacatgcgacatctttggcttacaatatcagatgcaagatcccgaagcatcaaaagagaacaggtaagacgaggtgaatcacggatacgtgcagctccatttgggagtatctccgctagtcaagttgacacctcgaatattccacaccgaagatgggcaggcttaagcgtaagccattcaacccccaggaagtacaattcagtctgcattcttaccaaccctcaccggtcataacagctcccaatctggcaattgccattgaggtgccgtgcagtttaactttacattatccctgcccctgcacgagtaccttgccaatagctgcaactgtgagatctgcaagaaaaacggctacttgctcgtgtacacctgcatcaagggttatcattaaaggcgatgatatgctaaaagatcatcacttttccgagcgcaagatgaagcagtgcggaggtagttgcttcatctgttttccgagaacagggattccaccaattacccccgttaatataagttgaacggccaatgttatgttgccaagtatactagctacggctactgcaggactttgacatcgagaaacctgattctcaaccagagtgcaaagtcttttatattagttattttactgatgctacccaggtatgatgctatggatgattgtaaattgatgacttaacttagcaccgcctagcgtagaaatgacagcagagggcatatgttacaactaagcgatatatatcacgctttggaaatttatccggtgctaagaaggatagatgccagggtatggtgttcaatagccggtacatgttgtattctcgaccgatatctccgaactacatgagacaagtggttggagttcgaatgcacaatccatcggcacggacctgtatgatcgacataaatgttccttggttggatctaagtccatcaggatctccctcaaaacgtggagaaggtgacatagacatatattgacggggtcagacactctagtccggtgacaaagcccatcacgctgaggggtatgttgcatgtcaaagcggcgtgacaggacgtgctcttccttagccaagaccgtgctagtcaggtacatcctagatgccatggatatgaacctccgaagacagcgtcatgttttctcgtcacgccaagcggtcgtctggcttggtcacccgtatagttctctagaatctgagtcaaggtcgatctagaacattgaatactcgagtatatctacaaagcaacaactcagttatgtgaaaactgagaccaaagatacttcggcctcttacattctccgatgccaatagtgggtggcgtccttgcagatcccccatgcccctggatcttcaaagtccgattggacccttttatttggcaggaatggcatctaatgcacaattcccgactatttcccgattttatggagatctgcaagtgacatgaggaatagtaaacaaattgggggtcgcgtgtgggtgtctgcccgcgtgctgccttcctctttcgcctggcctctgtcttgtcaactgcaacctcactatatcctcattccgcactcccatcatatttaagaattgcattgacctgctgtgtcgcagttcaggtggtctctcgtttgcaattcaaattattcttacatgtgcccccctgcaccgaatcttgcctaaataaacccgtatatctatacccaaccacatccacttcgtaatcatgcgcatctcctctctatcactacctttgatgctgggcctggctgggtcttctgccgcctatcctcaccctgagccagaggtgatcttgccccgccagtcggacagccagaccaaggccgatgctgtcaaggaagccttccaacatgcatggaatggatatgtcaaatatgctttccctcatgacgagttgcaccccgtgagcaatggttatggtgactccaggtgaacatgtccgattatccagttcttgctgtgaaactgacacgcgataggaatggatggggagcctccgctgtcgatgcgctttcaaccgccattgtcatgggtaaccaggatgctgttcagaagatcctggaccacatcgagactattgacttctcgaagacctcggaccaggtcagcctgtttgagactactatccgatatcttgctggcatgttgtccggctatgatttgctcaagggtcctgcatccaatcttgcccctaagtcagctcaagtcgatgccctgcttacccagtccaagaaactcgcggatgtcttgaagtttgcctttgatacaccatccggtgttccctacaataaccttaacatcagttccaagggaaatgatggctcgaccaccaatggtcttgcagtaactggaactctggtgctggagtggacccggttgtctgatttaactggcgatgatgagtatgccaagataagccagaaggcccagtcgtaccttttgaaccctcagccatcaagcggagagccattccctggcctggtgggaagcaacatcaacatctccaacggccatttcaccgacggtgctgtcacttggaacggcggcgacgactcgttctacgagtacctgatcaagatgttcgtgtacgaccccaagcggttcgagtcatacaaggaccgctgggtcctcgcagccgagtccacaatcaaaaacctccagtcgcaccccgcccctcgcccggaagtgacttggttggcctcatataataacggccagtatgatcttagctcgcagcacctgacctgcttcgatggcggcagttttatcctgggcggcaccgtgctggatcggcaagactttatcgatttcggcttgcagctcgtaaatggctgtgaggctacttacaaccagaccctgaccggcattggaccagactcgtggggctgggacccgacgaaagtgccatctgaccaaaaggatttctacgagaaggccgggttctacatcaacagcggctcgtatgacttgcgccctgaagtgatcgagagtttctactacgcgtaccgcgtcacagggaaagaaatcgtgggtcattctcccttccactgatgttctaatatactgactcatatagtaccgcgactgggtgtggaacagtttcaaggcgattaatgctacctgtcgaactgactcgggctttgctgctgtgagcaacgtgaatacagctggcggtggctcaaagtacgataatgaggagagcttcctctttgctgaagtcctgaaatatgcataccttgtacatgccgagggtaagttgctagtcttcccagtcacccttctttttttcaaacattgctaatcctgggttctggtatagatgccccatggcaagttcagaagggccagaagaattcctttgtgtacaataccgaggctcatcccatgagagtgtcccacacctagttcatacgagagttgggctatcactacagtatatagtgcatgcatcaagcctttattatcctttgtcattggatttagtactgcaaagaaagacaatttgtagccttctaaaccatagtaatactgaaaactaaagccttcaattcagacggttctccaatctggcagagtacagtaaaaacacaagtgccccgtgctacacttcagctccattggacattttataaacgtcaaataaaaaatggcgcccgatattgatacttgagtctgataagtaatctatactttatatcgagatgagcaattaatagttggacgcacaccatttggttgaacttaccgacttgcctgccaaaagaggggaaagacaacattggtcattgcatattgattctgggcctgtttaggatatatgtttcttatgaattggccagtcaacgaagagttctagctcggctacacgatatgattgcgccattttcagaaccggtgacacaatagctcgctagagaatgaatttctataaaacaggccataacacacctaggcaagacacaatgatgctatccgcaaagaatatcgcgaacacgctaaattactagtagacgccagagaagaatctccattaccgtgtataagatggcgatgcaattctcttcgaatacagtaaatagtagaaagcaattgatcgcaacaaacctacatatcacctacagccatggctctcctaaaacaaactctcctagcagcactagcgacaacctcactacaccaaagcaacgaccactaccgctcacgacccgacctcgcaccaccgcagttaaacatcaccatccccgccgcaaacccgaatggctccgaatatgttttcatcgccccgtactccgtggacgggacactagaacggcccggcccgtacatctaccgcaaagacggcgacttggtgtgggccggcacaggctactacgccggattcgtggcgaatttccatcctacaacgtaccaggggaaacctgttctccaggccttccagggtagtattgatggtgcgcatggtgaagggtttgggcagcatgtcctgctcgatcagagttatcagcacgttgccacctcgactgccgcgaatcatcgtgtttcgtcgattcatgagttcaatgttatccgcggagagacggctttgattgaggtcttctatacgactccggtgaatttgtcggcttatggtgggaattcttcgcaggtgtggttggggaatgggattttccaagaaaatgatattgccactgggaagttggtctttgagtggaatgctttggaacacgttgatccttctggtaagataatttgcctgactttataaagatcatatctaaccgtcgactagaaagtctagtgccactgggctccaaatatgctaataacggactgtcgtccgccgaagcatgggattacttccacattaacagcctcgacaaaaacgaagaaggcgactacctgctctcgtcccgacacacgagcacgatctacaagatcaacggcacagacggctcaatcatctggcggctcggcggcaaatatcccagcttctcacaaatcggcaactggaccttcggattccaacaccacgcccgctggcaaccgcaaccaagccagctggggacggaggtaatctcgttctttgataactccggcgacggcactatcacattcaacgatgtatcccgggcattggttatccagataaaccacacagacagcacggcgacggttctccgcaaagcaacagcaccttatgatctccaggcccaatcccagggcaatacgcagctgctttctgacgaccgaatcttcgtcaactggggttcggagggtgctttcacggaattcggtgctgataatgagattctttaccatgcccttatcgaaacgggggcggtcagctaccgtggtttcctggggaactggactgcgacgccgaaggaaagtccggcgctggttgcgctgaaaacggcttcgaatcttgtggagctttatgtttcttggaatggggataccgagactgcggcttggagattcttttatgtcaacgggcaggagaagacgcgggttggtcaagtggataggaactccttcgagacggcttttacttggaagtcgacttttgcattgtcttcctctgctagatttgttgctgaggctgttgacacgaatggggaaactcttgggcagacgagtttgactgctaccactgccaatatcaagttgctggcgtgatagccaagattgggggacctcagatcttcaactccggtcgcagagctctcttcaactgtgctctccttctaccatttgtcattctgccatattcttctagacttactatatatacacccccaaattactagctacacacccttttgaactactttgggtcaggccttttggctggccatgtaatttaccgagttttatcaagtaatctacacaaccactaaatactagcactcccaactacccattattcgtatttgtaggattattactatcatctgttatgcaaatagctttataaaactagtcggaggcggtatcgtatcatctgaagaatgtgtagctagtaatttgggagttatagaggtccctgggaatagttgacaaactaagctccgatttgaaacaagttatcacttctccgacatgaatacgactatatttcccatcgattttgatcagagcaaggtcccaacctatgacttgatgcagcggaaggagacgatcatatgactttatgcggcggaaggaacacgatcacatgattttatgcagcggaaggacacaattcccatgagttataagtctggactaattaaacatctgcaaagtattttaggcggacctggtccatcgcgagctcttccggcattggctgtaggaatttatcaatctcatggacccaaaaagtgttgtgtggattgacttggtaggcagtagtgtatttccaatatgacggataccaaccagcagtttcccaatcaatgataccaacgagatcatctccacgaacaagaatgttgaggctgctaaggtcgccgtgcgtaaataccaaaggccaagtcttgctgtgctgtttgataagttcctggatgtcagggggaagccttggatcaaattccatgcccatgcgtatatgccgatggaagtcttggatgtttttaaatggaccgaagcgcaaggaagtgcccgcaacacgacagtcaaaaagtgacccgccatcaacattagcaatcatattgccttctgggggttgaagtttccgcatctcgaggattttctcagctaattgcgaaagaagtttcgcctttgaatcctcacttcgataaacccagcgtttgccaattatgtctccctgaatcctttccatcacgatataggtccgcccggatcgagtgaatgcacagaaaacctttggtaccgggatagatgtatgctgcgatatgaaccgcattgttgatgcctcagataaataaacgcgacacccgtgcttaacgcaaattccgcccgtcaacatgagaacattcccttgtcgaggtcgaatacgctcaaggagtttgatcgctataagtgtcgaataccgacgcaaaaaggtgttcttgactggttgggatgcaccaaatgaagcagaggatggcgaggaggaaggtcctttttgactggacgacattatgattgtgcttgaaatgttcaagggaatatctcaggaatatctcgtttctagactgtgaagggaacttagcatggggtcttccataggaagtgatggtcagtgatgcccaggggttatccctgatggtatgatcccaggttcgaaggtgtttagggcccttcacgtgatatcacatgagccgggtctattctcgggccagctgaagttattgtacgaattcttctatcttccacttgactttctattgtctctcccgcctcaatttggttggggtctgctgggtctgcgctgcagtgtattttggggtggaagcgggttcgacgatcgcctagagtgcccacttatatagctggccacttctacaaacatgtaaacatcaaactctcgcttagatagcaagcgaactacgaataaagaaaatttctataaattagataagaacgaccacacttccattctgtccaaataggaaacaaagagtctgtctacattaaggactttacatgcacaaacatccatgcaaacattctgaattcaaagcttggcatcatgtttccagcccggcatatcagcgagatctttcgccggggcactacgtatagatttgagagcatcacccccaggtctccacccccacggatcagctaggtctggcgaaagagacccttctatcagctcaacgacatgtttgccgatgttgggtagaagcttgaagctatgactgtagtatgcgctgttagcaagccgctgatggtataaaagcccgcatttgattatcaactcacccactatctcccgtggccagaatgaagtttttccacttggggtgttcgcagatgagtaaattggcgtcggcagtatctgtgcaccagcacatagagcggttgaaaagctctttatgcttgaattgaggcaagaatctcgcaattgccttgcgaatggtgacctcggaagcttctgggtaagtatctgtaggatgtttggcgtgtgatcttgggacagatatgtttttaggagaggtcgctccgtaaggttgatgctgcttgaagcgagagaatcccgggaactcgtcgcagactttgataacgccgtacctatagggacttagcatgcggttctgctctttccaacattagatcaagagggattgcttactcgttgggctcgaagaagaagccgtattcgccatcgtataccacgggtgtgtttttgtacttggctacttcctcgggtgtgagctgaatatgagcaaagacccacgcctgcaagaatataattagtaactgattcatttgaaccgggatagagagaagaagtatatcgtgaacttactttcgaaacacactggtcctccaaatctaccaatgttggactccaagcaccagcagccaagaccaccttgtcggcgtaatatctagtgccatctactgtctcaacaccattgcatgtgatcccatcggcggtaaacagcggttgcttgaaagttccagatctatgcaatttcgcgtcagtaaaataaatacaagctaaaaaagggtcattacatacttgccaaatccaaagttgacaccttgatcctttagaaaaagtccgattgcattgatagccttggctgcagcaagccaacctccatcgccacaaaacaagcctttccacccctgaatttagactttattagccgctggcccttcaaggttgtgtacgggtgaaatttacctttacctgctctcttgtaaagactggcatcttttcaagtatatcatcttcgctttctaacaaccagttcgttttctctaacccaatgttcgcgtcgagcattgattggtagctttttcgaagatctgcaataccgtctttggatgacgagcagtcaatctgaatgtgttagtatggaatgttgaatctccaatggctatttttctaactcaccctgccgacattgtgaaagaagggcttgaatagtggatcattattccacatgtcaagagcctcgagcgaaagttgcagatctggcccattgcgcaatcggatgcccatgatcttgttaagatcgtatcctgccgattgagccgaaggaatgggatatacatcaagcactgtgatattcgagggagtatacccagagcggatgaggtgcaacgctgttgaggaacccatggtgccgcctcccccaaccaccacgactttcgtggttgtacgcgaatacgccatttttcgggtcatttcggtgcgaaaaccagaatgagggaaaacaggatgtgaatttaagaagttgaatggcaccaattgctaagaaacttgctaaagcgattagataatccccatctatataacatcgcgtggaccttccatcgattaccccgatggccagaatccggccttggcaatgcggggaattaccaaattggcgataacgagatagccttttgcggttatcggccccggctttcgttccgttatcatttgatatcggctcactggaagtccatacaaagattacgccgccatgaatgcgcgtactttcgcgtggaccttcacccggcttgatatgacccgaatggaacttgattgaccccgaagctagaggggaacatccatgtctctgcgggtagaagagataagctcacatataaaaagcaactaggtcctgcaatcaatgtcgggggaataaatcaacacgcatggaaagcgaaattctgttgacatcaaagaccccgaaagccctgtcatggcacaacctatcataatggccgacacaaagactcctgtctcggattcgcacgatgctccttctatcgcagataatgccatcggccatggtgctgtgattgacatgcagcactacaaggacaccgttccgctgtggaagcgagtatggcagcatagtctgacacagatgatgctgttgagcatccaagcattctgtggaccagcaatggctgatgcaattaccggtaagactgattcaccattatacgctaggctacagaatggcctggacctttcgctaatgttttgcaggcctcggtggcggtggtcttgcctctactcgggtgtcaaatatctcgacctcaattggatatgccacgctggcagtcggtatgtttcattacccaacatgagtatttagatactaatttgaatagtctgctgcatcggaggtcctcttgtgaacaaaatcggcatcaagtgggctcttattctcggctcaatgtccttcccaatccaaggctcggcatactactgcaacagcaaatttggaaacgaatgggtgagcgatggcaatgacaatggaaacgacaagaaatgtgactgcatgatctaacaagtccctcctagtacctcatcctgagcggtgctatcagcggtatcgggactgcttgctggtatgtcgctgaagctggagccatcatgacgcttgccccctccggcgcccgtgggaagtatctggctctgtggatcgtttcgcgaaatcttggacaattggtcggcggtgcaatcaagtgagtaatgcctcagtcaaagactcgaatgggaaatttggactaatactttcgctctatgtagcctatctaagaacttcgaaaaaggcgtcagtggcggagtcacttccgatacgtttattgcctttgtgatcattgagtgtcttgcgtgggttcttataagagagaattgcctgcaaccttatgcttatgatgtttaataggctaccattcgcgctattgatcacacccttcgaacgcgttgtccggtctgacggtacaaagattgtcacttcggaaactctttccaccaagatggaattcaagtatattgcaaagaccctgagctcgaaacttattattctttctgcgccctgggcactttggtcatttttctacgggtaagcccgacagtcactgccatcaccatcaaaagcgataatgctaatattcgaaagtggtacttggtctacatatctaggaacttatttcaccgtccgtgctcgcgctctctcgtcgctcatctcgcctttcttttgcatgtaagtcatgcgaaatcatatcatcaacacaaactaaccttggtgcgtatcagcattggctgtttcggcctcggattcattctcgacatgaagggtttcagccagcgccgtcgtgcccagatcggcctctacactgtcatcatcctcaatgtcggcgtctatatctggtccattattatgcaggtcaagttcaaccacaacaagcccggcgccatcgattgggacgatggactgtacgcttcgtcgttcctaccatatttcttcgtgcagacgaccggtccgctgtcccagtcgtatatgtattggcttttgtcttccttcgccaccgactcgcagggtaagtgactccatagactcggacccgagtccatcacggcattggacgctaatggcaatttcagaaaatgtccgcaatggtgccgcattcagatgcattgaagctgttggccaagctattgcctatggcatgaacacccagattaaaactaatcctctgattggattgtaagttcaatcatctgaattcgtcccttttgacaaaaagccaactgacctgattcaagctgcgtgacgttcgccctactcggagcctctgtaatccccatgattctgcttgtcaacacgacaccggaccgtatccctgcagatttagttgccgaggagcagaatgctgctcttgagaagattcgagatgtctaagtctgtttgcatggcggggctgaaagcagcttacgcctttcaattaccaagcttgctagaatgatataaggagtcttatttgcccctacttggattgtctatatttcgtttatttaatctggatctaatggtcaacaattttgcttacttgaaactactcctttccgtactattgtaacgttttgcattcgtttcgtaacgcgcgatcagaccattcaatttgttaagttgagcattaatcaaaaaccccttatcatcaagctgaaaccaaaagaatgttctccgtcaaatcaaactgaaagacaggtgcttctcgtaaacataaaagtcgaaaggacataagaaatgaatagccaaaagaatgagggtaaacaagataaaacacactcgcatccatctcacaacgaaccaatccatagaaatgttcgttcgggcaaagcttcgccaagccctaaattccccagacaaccacgcgcattggcttcaacggtactcaacgcgctcgtagatgtactcaactacttggcgggagtactcgacatcctggtagtagacctcatcaccccggtagaagacctcatcaccctcatagaactcatcatactcctcgtggaagaactcctggtcttcgtagtagtcatcatcctcttcgtaggccactgaacgtatgactcctagcatgcgtcccggtcctagtctatcgagatgtctctcgatgactctgtccctttgaatcactcttctctcgcctctgttgaaccagtaatcgagtagtatgagaagtagcagataccagacttcgtcaactgaaggcttgaagctggagatgggaccgatgaattcagaaccgccgttccaggtcaggtgttctcggaagttgaagttgcgggaccggactggttcgctttcacggcgtctggggaaacgcacgaagtcttcgaagatgaataggatatggcagaggtttgaggcataatagtcgcatatctcgaagtgcgcgtgccagaatgaggtaccacgggggtagacctttttgcagatagtgacaatgcacatgttaatgttgaggattggggctgtagaagttgagcttggaagaaggtaggtttgaatagagtgggaatatcgaagctgggaaagaagggctttagtcttgatagctgcttgagaaatgggaggatttggccggatatttaaagcacttcatcacccccgtataatatcagctttatgcttttctacaatcaggcaacatacatcaagcttagatatgattataagcagtattttccgagacatttatggccaatagatattatgactcgacattttgaggcggccagtagataggcagtgtatacttccttgctctttataacatcaagttatattccatagagggagtccacgtataggttcgcttgattttgggatggcagcctatcaaaatctcatagtatagtatgatacttgctgcattgtggctttggctccatcccaagagcttcaatattcaacctgattatagtaatgtgtattgctattattccctttctctttctactattttcaacgggattgctagggtaagagcctctttgtcgctacctaccatgtttgcatttttgcattctatatgcctcgtttgcatcatttgcatctgtgaagactattcactataaggtattctctgagagggggagaataacgcgggcatcgtcaatcacctatcaagagcacacaatgtttacttacactctcgcatccttgcatccttgcactcttgcactgctggatcaaaaagaaattctttccatctgtttcaaaggtggtactcttgatgttcacagtaccacgtcactctcatcatgataatgagtctacctactagtcaacacgaggctgaccaagccgaggccaggcaaggtgaggcagatcagaaagtgacaacgtggacatgacagctgaccaaccagctctagagcaatccctgatcttatctcaaggacccggtatcaatattagcatccaggcctttgacctgcgccactgctctcttgacgggcccagcgactccccaggaggccaccaatcaccctcggcatctctgggtagaggcaccggccatgccagcgatgacacagattctcactcgtccactgaacagtgcagcgagaacgaatcatctgaaaacgcgttagtctcacctcaaacacctctgagacaaatgatcccaacatggatctcgagcctcatttcagtctcaccccgactaaccattgatggaagttcttctcggcctccaaggtcacccagaatgtccgacccctgggatatctacaagtcagatactgctgtcgccaattaccgcgcgatcggggcccaataccaagcatggatagccgatacagccacaaccccatgcccaatccacctatcaacactcaccatggtagacatagtcgaaaacccgcatgaagagtacaggttcgaggtatgccgcaacgagttcagatccccacccgatgaagtggggaacctcgaatcggtcgggctctcgatggcgaatacttggcgcctccttttcctgaggcgacatggatcctgggatgacgatcgccgagagggttggacggcttaccagcaccgcaccgcacacggcgcgatcttcgctgagaacatcaccagacacttcgggccttactggtcccagatcgctctggcgcagtacgcgtacgaccatcacatcgacaccctccgacatgtttatgtagtcaacattcagaacttgtacacctggccgtacgtggaatcctgtctctacccccgtcatggcttgcaatggcacgaggacgatcgataccagtgctgggaatacggtaccagggagtatcaggagctcctgggtaccaagctgggaaggggggtggcgcgtctggttctgagcgcttggccgagaggcactcaccgtatcgaggcaatcatcacgtggacgtatgttgggaccttgcagatgcggtttgatatcgggcgaatttgattcatggccgagggacacccactgtatcgaggtgacctgcacgtggacgtttgctaggaccttgtagattcgatttgatattgagcgaatttgatttgtgacttcgagcttcgtgaaccaaaagagcgctttgatccaatgtagagcgaatcgtatgaagaggagaagcgctagcctctcttggcggtttcggcagaacttagagtaagaggtcgattggccatggcagggaataggctcatcgtagtcaatcagatgccgggggtgttggaaattttgaaaccctatatagtatgtagtatagtaaggcgtgggagacatcagttgacaatggtgcctaatcaatggacaaggcagaatccgtcgatctcaacactattgtgagagatatatagtgcgtctggattttgatgagccggcatcctatcaaccccaagcactatgctccggtgtcatattcacaccaacacgggcctaatagaagttgatattaatatcggcagcaagcagtttgactgcgccacattttacgtctctcactcagcttcaccatagtgctatattacatgtagatatgaagaattacaatgggtactgcgggtataccaatagtcaaaaggtcaaagacatgattcccaaataggaaagagatttcatccagtcctctgccgacaaaaacatgacgatttaataggcacatccgcccaggctaaatcagctttcagtcgcggcagcatggcacgcgcctcgtttttctgacccatcttgatcaaacactcaaaatacccatgcgaagcccatacattcgctggatgcctcaaagcacggggcagagatctgtcaaccccaaggtccgcagcatatacggctacagcctcctcgacgcgatcctgttcgagcaacaacgctccaagtgcgtgtctagccggctgcatccagccccacggctcgtcatacggcaacgaatcatctctcctcacagcttcccggagatatgaaaaggcagtatcgtattcgccccggcgatatgcaatctcgccatccaacatcgcctcaccgacacggaggatgtcgatgcagcggttattgaagatcgtccgtgaagccgggacaagcttcatcgctcccagaaaccgttctcgctcttcctctgcttccacaacacgactggtcgcagcaaacgcgatcccctttgcatagtgcatcatagcagtggtgacgcagtacaggtctgcgccttccggcagttccgcagcaataatatcctcccagcggccgaagcgcacaaacacatgcatttgcacggagataaagccctccagccagtccgccatcggcggcgactggatgcggaggagaggctcggtgattatccgggcgagctcggccgcagactcgagtgcgaccttcgatcgaccgcccagcatagcagcataaatcctgaaatgataatcatgcgcacggtaaagattataaaaatgtcccaggggctggttggcgaggaacttttcgtctgcgcggattgcagaggtattagccgccactgcgtttttgtaaccgccacacaggacgtcaatatgggacgacatgtgctccagatgaccagcgtctggtacaaggccgcgaagagagttggatttcggcagggcaagttcaggaatgggggacatttccatcaaatggatgtagagatgcaggacgccgggatgatcataggagtcggcttgttcaaagactcgattcagcgccttttccgcttccagtgttttcgcacctggcgccacctcgccggtcttcacgtcccacagaccccatggagtcaggttcatcagcgcatcgcagtacagcgcggtcacgtcgaggtcatccgggtaatcattgtacactgatgtcattgcctcggcataattcttatcccattccgtgcagtcttctatgggctgttcttggggataccggtgctgcagtgcatcgataagagcattctccaacggcgtcgcggtgggagcgtgcttcttggcctctaggatcgcgcgatgggcgcgactcgtggtggcggacagatcttctccgtcgaatagctgccatggcttgttatagttcggacccagggcaaaggcaatgccccagtatcccatgacgcacgtccggtcgaattcgacgaccttttcgaagcatcggatggattctgcgtggttgaaggcgtaggcccagatcaagccccgactaaaccatagttgggcatcttcatttgttgtgctcacattgcgacggtagtcgcctaggttatagtagtcctcggcgggagatggctggtccattttgttgatgtggttgcgtatgttgtggcggaggaggggtatggttgccgaacacggctctctcccagactcatatctaaccactttgaccacatgtgacacggggataagcgccatagcaaatgatgtatatactgggttatttacaaatagtcgcagctgagtaaagtgcctgaggcagtatatcctgaggcaacaaggcagtaaggcatcaatccgccccacatgagcagatttgaggaaatccactttaatgtgctcagtcatgctcgatcactctcaccttccaaggttgagcaccttgggggcctactgggaatcctatttagatagcctcctttcatctctctttgtgtttgttacctgcagtcaatatagtcacatacatatcaatcctcttcgatcccatctcattccatctcatttcaccagcttcacttttatagatcaccatgtgtggagacaccaaccgcccaacattcggaggcaccattgccgtcctattcccccgaggcactcaccagagctcgaacacttcagatagatcattgtcctcgtcaccagaatcagtatcctcatttgcatcatcatcgtcgattgcctcgatgtcatcatactctcttttcttccgcgacacggatgcaacaacgcccaagacaagagcaatcttccggacacaagacgcagagacatatcacgcactcaaagaatgtcgaaatgtcgatatgcgcatcgagtgggttgactctgttccacgagtcattcaagacaaaatgctgacagttcatatcaggaaattcggcgatctctctattacatcacaatccatatctccgctccaccagttccgtttgaatatgggacaggacaagaactgcaacacggcgaattcgatggagatcgagttcgagctgcccgaaaggctggacctgggcgtctcggacaagggtgtcattggccgacaggtgactgtcagagagcaggggggttcgattttggggatcggagtggtgggatacaactaaagtgactggcttctacatacttcatagacataattggaatcaaactaattgaaactcaaaactctacttcattatagacttcaaagcttcagcaggttctccacaccagcattgtatcgcttctctgcctcagcccagtgaataatcttccaaataccctcaacatagccagccttgttgttcaagtactacaagcaagcagtttagcagacaaatacacacaagacgggtagagcaagagaataaacatacctggagatagtaggcatgctcccacatatcgacaccaaagacaggcacatcaggagcattaataggatcctgatccttagtcgtaacaatctcaagttgacccttggcaccacccttactcacaagccatccccatccactcccctgaagaccgagcagctccgcaccaaaagccttaacaaacgcttcatgcgagccccagcgggaggcgatggcttcgctcagagcaggagcaccaccgaggtcattcccaggagtgccggggggagtcaagttcttccagaacagggagtggttaatgtggccgccgccgttgaagcggagtttctgttgcaatgcgatcagggttgggacatcatctgctgaagctgccgaggcttgagcggagagtgctgcgttcaggttgttgacgtatgcctggtggtgcttctgatggtgcaactccattatctgcttggagatgacgggttccaacgcctgtttattgttagtatggaagagattcgggttcatgatcggatggttcttacatcgtaggcgtaggggagagcaggtagagtgtgagacattgtggaattgtggattatgtgtgtgttgagagttgagaagagtgagaatggagagtagaaatgtaggcgatagataaaccaccaaggtccctggggatgcccctctctagaagtgacgtgatagtaagcatatgtcaagacctcgggaggccaccaaggtggatatccaccggtggatgtggacggcaattgggatgagttggattgagcacatttctcccaaagttgctctaacctgctcagtcggccctcgcagagtattcccggaattacataaagcaggtctaatccaccatctggtatctgtattatctcatacaatggtcttcctcgtttacaaagagagacaggggaactagccggggaaactgggtctctatgctcaaagtgggcttgagcaaagatatcatttacactaaacagaaatagagtcaaggttggacagcacgcattgtagaacagtcaacagtgtatacaaaaaagacaaataagaatgaagcaaaaaaaaaagataggccagcaggatatggaaccagaaggaaccttgaacaaagtgtcctcagaaaaatcttcactgaacaacagagagctatctctgtgataggttctaaaaattgggtcggagatgaaacagagctcctaatgaacaatgcaatgcgggcatcagctggacagtctgtttccacagacgtcagtcagaatacgcgactggtagagcattgttacctcctcagacatgtttcgtgccacaacctaacctgatacccacaagacagagctcgagatggtcgatgcaagcagcagctggacagtccgtatccacagacgtcagtcagaatacgcgactggtagagcattgttacctcctcagatatgtttcgtgccacaacctaaactgatacttgcaaagaccatggtaaaaaaaatcaagagcactccaggaacgaggtgtagtgcggacccagagtggtgtggagaagaaagaaaaaaggaaggaagtgggaggaggcagggaggtatttataccttcccagtggcttaaggcaaacgggtagttaggttgttgacgatttttcccaaaagggaaggcaccgaaccgggaaggttcccagccacccagccacctgcgcaccaggtactattcctatttgggtcactccatggtcatgacacctgagacctgatagaacagtcgctccatacacatattaccttaaatttgagaatcttggccgtttcgcgtgcgtgaaagagtctgtagttgttagatcatgcttctattcaaacgaagactcaaccgactactatcttgatttcaatatttattccagaatcatgttcaatatcatttgcatctagctactcagacagcctccataattgcagctattctgcataatcgtcatgtttaccatccagcgctgttatatctttgtgaaagtggcaaaatccctcgtttcttagagtatggctaatatcacaagaggaactatgaatatattcactttctccccaatctcaaggtggtttgtttacatcaaattctatcgaccaacggatctgcaatcctgtttgttctagaatccactaggtccttctagttcccgataatattggtcctccccttcctgccggctttgggaacagctctgggaaattagcccgccgccagttttccagtctcttgaactgcagctgccgtggcgtttcgcctcgtacattgggctgatccatcataatatcaccccctgcccccagcaagacaacacgcatctcatccagcgcttctctctcatcagcggatgtgggtatcatacatccatgcctgtctagaatatgtcctacgtgcagacaatggtgcaaggctgtatttcctctggaatctgtatgattgacatccacgcctctgcttatcagaaatttggtcgcctggacttgtcgtagattcctggccataagatgcaatacagtatacccatccttgtcctgttggttgatttcgacaccgtgtgatagaagaatatccatcagatggacgtcaatgggatcgccagctttgcaattggctgcaagcttgtgtagcacagtttggccattgttgtccactacgtctgcttccgctccgttctccagcaggaacttcaccactgtatcaaagtggtcgctcccagagcagcatgcgtgccgtcttattgcatggtgcaacgcgttttcgccctgatcgtcccgcgcattgatataactaccagctaggagtagcttcagggtatcgatgattcgatctttgacatgaacgtcagaaagccagcattcatccgaacctgggcccacggctgcccagtgaagaggcagacgtccattactatcgcgacaggatagggattctgtaatatcacttccccagtggtcaagaagcgttcgaagtgccttcgtattccaatacatgctgctaatatgaagtgaagtaacactccatggcattctcatatcataccaagagtgggatgaatggttctgctggaactgctccttagcgtgtatattgggcccttggtcaatgagtcttttcaccaacgcagagctggctctagaggaggctagaccaagcactgtaccaaatgattgtagtggtttgctttcatcactatcatctttgactgcattaccaccacagagtatcctagacgcccattcaacgtcattggtggggagttcaaccgcttgagcagacgcaccgctatcgaggagcaagcttatcaatttctcgccacgggcaattaaaccgctcctccatcgatcgagatcaatgggcgtctcagatccgcgaccttccggagacaaatacgtcagagtccttgcagccgccagcagcgctttatcacggtccgattgattgaaatcgacggaatctggcgcaggctgcatatctaggataagctgtgtcgtctgaagatgctgcccgctgcatgctgcgctcagcaatgagtgtttccttcgatggagcggtttcttcgttaaactagtcttgtagtagtgatccacgaggacacggagaacatcagtgctccctgcctccgctgcgacacacagcgggtcgtagcagaaatcatcttcattataaagattcaggcattcgtagacagtgagatattgcttcagcctgggaacgtcattgagacggattatgctgtctagaagaccacagtcccaggtctcgtagagtcgagtgccatctgtgtcgtggagggcggtctcttccgattctagaatttcgttcccctggatatgaaaagtgctgtatcgcatggtccagagatttttgtgaagtgaggcgagtgtcaaatgaacacaaagggagaaaagaaagactggaacctcttagcttagggaaatgtctccactaacgtagttcccgcccgagtgaaacaccccaaaacactggcttggaaagcgaattcgttcagatataaggcaggcttttcagtcagatggtcgcacaaagcctcgagcgtcaccggagtgatactacgcaactctcggaagaactcctaatatagactagtgtgtcttggcgtaaggggcaggaaagtcaatcgaagagtgtatagattactaatcccccagattccaagctccaagcggggtagggagagtcaacgagcctcggtcaattcggctggtgcaaatacaaatagctaggcccggaagtagcccacttttccctcaactcacttttctacatagttgagttcaaatccatacataatgtccgccgaagaacaagtcaagctctccgacttctccagcatcttctccctcgagggcaaggtcgctgtcgtaacaggcggttcccggggactaggactacatgcagcctcagggtatgtatctctctagtaccctgccaattattcctgacatatcctaacatatctgaagcctcctccaagccggctgctccaaagtctacatcacttcccgcaagaaggcagcctgcgacgaagcagtcgctgctctcaatgccattcccaacaagcggcctggcgcacaagccatctccgtgccggccgacagcgcagatatgaaagagctagaccgacttgtcgccgaggtaggcaagaccacagaccatgttgacattctcttcgccaatgccggcgcaacatggggcgagaagttcgacactcaccccgagaagatgttctcgaaggttatggatttgaatgttaagagcgtgttctacacgatccaaaagtatgttatttgctagccggaactagggatgagaaggattctaacatcggatcaggttcaccccgctcctcacagcaaaggcaaccgtcgcagatccatcccgtgtcattatcaccgcctctgtggcgggtattggcattggcgcgatcggtgagcacgcaacgccgtcttactctgcttccaaggcggctgctatccatctcgcgaagaatctggctgtcgagcttgggccgcgtcatgtcttgactaatgctattgcaccgggattcttcccctcgaagatggctactgggcttattgaggccaagggtgggataaagcatctggaggagttctcgccgaacggtcgtctcggaaagcccgaggatattgctggtttggtggtcttcctcgggtctagggcttcgagtcatttgaatggagcggtcattgcgacagacggtggagctgtgatcaaggggagactgtaaatgtttgatttgtggctgtaaagacggtatagataggtgcccaggtgttctgctttgattagtaaatatttgatatctcactagccaaaaggaaccgatctgttcatgtagactttcgagacctcgggtactacacctttcgcaatgtctgggccgaggcgggtgttctccacactccccgcattaaaaaacacttccgcgcctcgatgtttctcactacatatccaccatggcctcccaggaaccccgttatgtggcagttgctcagcgcaagcaagcagaccttgctgcagctatccctgcagaatggcgcctgccctcacacctcatccctagtgggatgctctcaatctccgagtcgatcaccgttggcccaaagaattacgagcgagtcggggtgatggatattccacgcacatgtggtatacttacacctaaagagttggaaataacagagaaatacgatgtacggagccttgtggcagaaatgacagaaggccggttgaaggccgaggacgtggtgcgagggttttgcaaggtgcgcccacacgccgattatctccgttcgaggcactaatagatctggataatggcagagagcagccgtcgcccagcaactcactcgctgtctaaccgagccgctcttcgactgcgccttgcaacgagcccgagagctggatgatcacctccagcgcacgggcaccccgataggccccttacatggtcttccggtgtcggtgaaggacacatttaatataaaaggcgtggactcaagcattggattatccgccctagcattcaagcctgcaaaagcgaatgccccgctagtagatctgctgcagtctttaggtgcggtagtgatcgccaagacaaatgtaccacaaacactcggaacattggatagctgcaaccaccttttcggacgcacgctgaaccctctcaaccgtaaatggacagccggcggcagcaccggcggagagggcgcgttgctcgccatgcgcgggtctatggtcggttttggcacggatattggtggtagcatccgcgtgccagctatgtgccagggtatctacgggttcaagccgagtagcggacgcgtgccatttggaggccagcagagcggccagattgaaggtaagggccggatagggttgcaagcagtggctggcccgttggctcgctctgttgcggatatcaacgccatcatgacggagatcgtcccacgcgcggagctgttcggcgaagattgcattccggggccatggtcggtaccagccataccgcttgctcccgctcctcggcacagctttactattggtgttctcaagactgatggtctggtcacacctctacccccgatcacgcgaattctgaacgaagtcgccaacagcctccgccgtacccccggcgtcgaggtcgtggagattccgcttccgccggtcctagctaaatgccaagccctagcgggtcggctgatgggcattgacgatgggtcgcatatgctcgacctgattgagagcatggacgaagacctcattccctggctgcaaggtcgaatgaagcgcggtaaggccttgaccgtggttcaactggcgacgctgcaggctcagcgctctgagattgagagggaaatgatgaagatgtggactttgtcgtcacaggcttcgtctgtcgtccgacgcgttgacgccataatttgtcccgtggcgccccacccggtgccggagatggaccgctacaatgccgtgggatacacctcgacctttgtgctgctagactatccggctgcctctgttcctgtccgctcgttcacagacgctgatctggagattgggcgcgaaatggaggcaccggtgttggggagttgggataaggccaatcggcagctgtgtaagttccaatatgatatataggtgatatttcgctaacttgcttcggttacaggggacgagaaaacggttgaccgtcgagtgtacctcgggtcgcctctcagtgtgcaggttgtcactcccaagcagcacgattatcagcttttccaggccatggagattgttgaccgggctgtacagagcgggggttcagccagtgcgaagctgtagccattgcaatgtgtcatagaaacacgacaaacttttgacgtgatcacatgggcccatcctatttacaaaagtcttaagttgtattcgtaggaggcaaatatatgaagaaacgccaagaaacaaaaggattcgtcgggggcgtcggctcaatgttcgcaatgcgcattgacctgattcgttgacttggagaagtcaagcaggtcggccaatagaaatcaattccattgggccagaaccacacaacgggcgataagcaatgcggctaacccctgacaagactaaagccaatctcgcgatgctcttaattatggcgccatcgtcgcccatttaccgtctctggcttggccgtccacgataccatgttaacgctcaggccaaaaaaaaagacgcgaaaaaataaatgaaaaacagggttcgaatccacgtgtaattggtctctcatttgtttataacgtagagccgatctcgtgcctattgtagacttgtcttcttcctatcacctatcacctccatttcacccaacatgtccaaggacgacaggaaggaaccaggttacgacctgggcagcactgagaccaatggagaatatttcgataccatcactgctctggtcgctgcaggtacggcttcaattgtgctgggttgtggttatcggactgagctgaccttatctttcgttcagaccatgagcatgaaatcaagcttcggaccatgacttggcagaagacggcctgcctgcttgccggtgagcaggtttgcttggccattatggcgcagacttggtccctctcgtgagtaaccgctcgaatatctattctcaatgaagctgacggtgttttcagcgtcctcggatgggttcccggtatcattactatggtcctctgcggattcttcttttgggtgacctcgatcacgatgcataaatatatcatgaagcatcctcatattatggatatctgtgagttacagtccgatatccttatacttgcagaaaactaacagcttaattcccaggcgatttcggataccatgtattcggacagagcaaagttgcctacatcttctccgcattcatgatgcttgcgaacaatattctcctcatcggattccacgtcttgaccggcgccaaggtcctgaataccctctcggatcactcattgtgcactgccgtcttctcgataatcgtgactatcatgggaatcgtcatgtccttcccccgaaccttgcaacatgttagcctcatgtcaatgttctcatgtgagtagctgaatcccccagctctcagatgtcccaactaaccatttcagccgcctgcatgggtatcgcagttattctcttcctcgtctacgccggtatcgaaaaagcccctctctacggatacaacggcagctacccgacagacggagccgtgaggacctatgccttccctctaccaggcaccacatgggtcgcctgtatgaacgccgtgatgaacatcacctttatctgggtgccgcaaatcctgttcccaaccttcatctcagagatggaaaggccgcaggatttccccaaagcattggccgttctcggcgtgatctccgcgatcctattcatcgccccttcagccattggattccactacctgggccagtattccaccgctccagccttcggcagtttgggcgtggtgtcatacaagaaatcgtccttcggcttcgtcatcgtccccaccctgatcatcggcgtgatctacgccaatgtgactgcgaaattcctctacacgcgcatcctcggcaagtcccgacactcgcacagccacaccgtgcttggatggactgtgtgggtgttgatcatggtagcgatctgggtgctcgggtttgtctttgcagagatcattcccagcatgggtgatttcctttccctcctgagcgcggcctttgattctttcttcgggttcatttatttcgccgtcgcgtactggcagctcaaccggggatcgctgttcagcggtctcgggaggaccgctaacactctgctcaatcttctcatcttgatgattggtctgttcttgctgggtccggggctgtatgcagccgttgaggccatcatttctgactactcgggttcggtcgagcctgcctttacttgtgccaatatggctatctaaggggaagtcatttaatagctttttatgatcggatgggtcatttgttgcgatttttttatgttttatgatgacttcaaaagaaaagaaatgaactggaatatcaccagccggtgaaaatccaggtttctgtctatcttttatctgtagagtccctgagggcaactacctctcaattccctattccaccctccgcaacccgggataagtataaatactaacaagcctcggccctccagaatgccctctcctcgccgataaaagtactaacaccaccatatctactaccgccgaatacatcgacagcagcactgggacccacaagggaagttccgttaaccgttaacaccaaccaagcaccgatcacacgagccaggatatcaatctcccttaaccctccacatcaagtccttctctctaacaagaagcaccagctatatgctcatacctcactggactaagcccgcattaatcaaaatcggaatcgcccgatcctcaatccactccgtgcatttaaccaacggccgacgcggctccccaggctcataaaacaccaccggatcccaactcttaaccggctccgtcctcatcgtcactgtattaaacgccttctgcttcggcggcgcgggaacagaactgagaatatcgttccagttcttcgggtagttgagagctcgcgtatgtccgataagctccttggagaagaagttctcgtctgtttctgggtcgtcgtagctcacgggctcgtagtgcatgcctgtgactatgtcgcccgtgacgtggtgcttcgtgccgctgcctgggccttgggcgtttgtttgcacgaagaggatggtgtggtagcggggtgagggcatgtctgggtcttgcattgagaggttgagttttactttgtagactgggtagatttgggaggttgacattttggtgggagtttgaggcggatggagattgttcgaggactggcttgtggtttgatgctgagatcgtcctttctttaatgcctttctttctccccgctttttctgctggcaagtttggtatcacgaaatgcagctagccgcccaggcggattggaaatagtaatgtatctctctatttagtatgagcggttaagatcttgtctgacaatcaatgttggtatttccaatatgtccagtctagcggctatccttggtgcattcttacccctcactttcgactacacactcgagaattcccagcaacaagcttatcgccacagttctccgcatatagagaagagttcatttgtcttgctttccttctgatgctgctagatcagaaaaaaactgttgcggctcggccagggtcgttgaatttgcggctgcctagccatcatcaccttgaggtccttgtccgaggcttttgcagaggtcaatctgctatagagatcaatatcccgtatttgctctggccaggattcatggcagcgacgatgggtggcccatccttcgtagtagccaacgactctgtccatgaagaaatctttggagcaggtctcttgtttgaacgtcaaggttttgttaccgcactaagacatgtcagtcgatacctgaaatatcgagatattggggttgttcaactatagctctaatgcttgggttagtatttgttcacaacaccataggtgctctccgagtaaatgcgctagtagagcgtctttgttacatcgacgttttttcaaatttcacttgtagtagcacaaacttcgaactattcaaactccaaaaaaggggcatcaatggcaacagattaagcgtcgaggctctactggttatagttcagctaggttcgtgtgatggcaagaagagtcagggcattttcaagtctcttttctctaatcgatctagtagacactcgcaaatatagaattgagttctgttaaagcagagggttcgggcctttccggagaagaagggatcaaaactatgaaaatgaagctaagcacttggcgtcggtaaagagggtctcaattttgacatggaatatccgaggcgatgccgccatcaagtactccgtacctcgcctaagattagctcggctctacagaatcttccgactgttgcttcggcttcaattttgaggcgtgatggtaattttcgcgtggcaatcatttcggcatctcagtatcagaaggtctgactcatttctcaatgcatgccgacgttgagtcgtagcttcctacaccccctccaagatgggatcttcaataatagcatttcaatagccttcgcggatcaactcagcacatgtagctacctctcggggccagctgcgctcataaaacgccaggtcagccagacaggcttggtcgaggttttcaatggctctggctcagtcttcatcgtatgtgctgccatatgagctacgatatatggcccatccccacggccaactccaccccaacaagattgaaagtccaagaagcctggatacaaacttccaccctagttttgcgtgttgtcggttgcgtcgctcaataagagtttctttgggtggaaactcaggtgagcgctatggtgtaggccatgacttgtcatgagatgtacgagtggatggggattatagcacatgatttggcgatgttgtgagtaaatgcatgtggttgattggaaactccaggtcttgcatgttctttttatgtctcgcttacctcgcgccggggcgtcgagtccttcaccacatggactgatttatgttcagaaattattgctaagctgttgagtggtcaaaaagagaataagaaactaatcacctattgatttcatctccaaaaataataaaggaaatagggtgttaattgcatacaattggcccggcaacattcttcacctcgaatcatgcgcattcccaacacctcccctcaagtctactataagaatcattatttccttgctcatacgcaaagagatgtaacagatgtcttttaaagaagcctgtgccgtgtccacttttagcccgttgcccggcctccactctagccccttccaaccaatcttgacactatcattgtcgagttgaacaaaccactcaatcgcatcagttttggcacgtaactcaaaatgcggggaatgcgatggcgctcgtgaaacaaatatattatagttgcatccgctataattagtgttcgtgttcctcgtgttgttagtggctgctaggagagtatgaatgcagggtcacgaacttacgagaaaggatcaagcaatatcccagctagtttgtaatagattccttgaaattgttatttttgtaaataattttggagatctcacttgtttggggtctataatgcgaatgccacggcgatcgtgttggatcagagggtgaaatacgagtgaaggctcatttcctcctgcaagggaaatacgaagacagaaatagcatgtagattttctcatagcatagcgtgaatgatttgtctataaagacttcaatgttcatcgccattcggattcctcttctccaactcagcccttctaaaccacagagaacaagaactctctatcacaaacaacaaccaaacaattcatcatgcatttcatctccctcattgccttctccctcacaaccgctataacagcggtcagcgcctaccccatcaccggcgacaccgtcaactgccgctccggccctggaacaagccatacagtcgtcaagacatacaaaaaagcccacgatgtcaaaatcacctgccaaaccaccggagactcaatctccggcaacaacatctgggacaagacctccgacggctgctatgtagctgactactacgtgaaaaccggcagcaacagctacgtaaccgccaaatgcagtagcagtggcagcaccagcagcaccggcaccggaaaagccatcatcgccgcagccgagaaggagaaaggcctcccgtacgtctggggcggcggtggttgcaagggtccctctggcggcggctttgactgctccggtctgacacagtatgctgtctgccaggctttgaagaagacaattccgcgtgtcgcgcaggaccagtataactccagcttgggcaagcggtattctcgtgcgcaggctaagcctggtgatctcttgttctgggctactggtggtgattgcaagaacaaggttgtgcatgtcggtatctttatcaatgataagacgatgattaatgctgctcacactggtacgccggtgcgtgagcaggctatttggacttcctatggtggagagagtatctgtccttatgttatgaggtatgtatatcattcttgggttttgggttgtcatactaactggtgtatagattcacttgagctttgggtatagctggttggcttgaatttcttttggagattccgattgagagacgattcctgggaaattcagatatttgctggttggatttgtgtgatactctagatagaatgttgaaatggccttctatcttcttcatctattcttggtagccaaatacctaaggtgtgtaagtgtcaattgaaaggaaggaacttatgagagatgatattgggaaaatggacatgtgacatttgcgattcaaggaaggtgcggtggaactatcacaagttaggaaggcaaggtttattggttgtataaaaaggtccctcctccccttcctcttctcttcttcctcaccccatccttctagccaccatttctccgtagcctcatgagacagcgcaggcagagggtctcgtggcacctgctgcctaagctaccacagggactcatgtatttgatatgtaactccacaagtgacggctctaccttgaaaactttttatgttatagaaagtcctccctatgaatgtagcaaggaaatggatattgatatccgcagattcttgagccagttgagaagcccccaaccccaaatataccggagatgaaacgtgacactactgttcataaaatctctctgcgattacctgttgaagaagccaacattttatgtcgatgagcttgctgctttcctctggaatggtgcaaacatagattcagtctcccaattctctttgattgtagcatagtatggtccagccattttcgactcgcaaattgatgatagaaagaaaatcgaaatctcagatagggcgtgttttccgtcaacactgttgaatgtcacgctgtacactcacgtaactcgatcgatagaccgaaaaagcagttcactctgtctttaaatagcagacaatcctcacaaattttacggctgggagaggttatcagaatacttgccccacgcaaagtagcttctggctccattgttgaaatgcggttgaggcgtctctgaagtgttttcttatcttcccaaagctgtatctgaccctctcgagcctttaatttccggatttcgggacgagttccaaggagggcaatctcatcatcaacaattgacacttcacgtttcaagcgctggaccagtgcctcgtcatattcgtccccaagtaatcgatcgtctttgtcaaatagcttaaattcaagttgctttctatcatattggagctgatagagtcgggggatgctagggtatatagactccagttccgatattttcaaattttcatctgcgatttctttatcaaaccgggagtcaagcttcttgtcctcttctagaaaaacatgtcggtcgagaaaataagcgatcagttgcttttccgcgtgggacgcaaaaaactgtccctggataccgtggtccttgcgagcatcaacagcgagagtatgaccaacgatggtggctagtttcaggaccctatcagtccaatccttgccgctcacccgtgttgaaggccattgtgagtgtccccagccactcattgccgctatagatgggaaaggaatgcccctttctagcaaagcaattgtcttgtaagatgtagatatgggatactgtcgaattggaccataaagagtgaccgattggccagtagatgaccttctgaaggagtgagaggctgtgtcgggatattgtagtacgagatctgccttggtgtgcaaatctccctcgtcaaggatgcgcgcaatctctcgtcgatcaatatctcggttgacgacatcttccttgtatattggctctttcggatcgccccagaccccacccccaaccgtgtgcctttctttgcggttcttatgagttggtttggtaagattcagggctcgttgatttttgttatcacgcaatgatcgatcggcaccccgagaaagcagtatctttacattctccagcctaccccaaaggcaggcttccataagcgcagtccgcccgttcttgttcgttgcgttgactcgagcgccaaagtcaaggagcaaggagatcatggatgatgttttctctcgagaagccataatgagacatgtatctccgtaataatctcgcccgtgaaggaaaatgggtttgtcgactgattctgtaaggtaatgcctcacttttgatgtttcaccctgggtacagttcgatatagcgaaaagtatgcgacgttcctcgaagggctcttctccttctagtgggatggtgattatctctttggagtcctcgaagctgatctcacgattgttaaacccacttggcatcctcgatagattcatattggacagttgatcagacaaaaatgactcatattcggaactggctaatgcttcaagagcgttgatattgataaaacgtgctctagctttgtcaatctcataggcaacaggaaatctgtaccgatatgaaggtcgaggaaagccacaacgcgatacatgcagggcactttcgtaggatctaaaccgatggtgatggagctcctcgcaataggggcatttgaggtagagataggaatccgtccaccaaataacatcgacgagaggattggcttgagtgagggacatggtcctctgatgaaatggtaatatgggacgctgtggttagatagtcaaagaagagaaattgtgactcagaactctgcggaaggttagttagttatatcattttacaccgcattacgaatgacgaaggaggcggaaaaaaatacgactcgcaatttagagctcttttcaatacggtctgagtcaggttgggcgcgagctgggagaaaactcaagtgccattataagcataactctatgtactaatgtgtagtatcgtacgcagactgtgatgctcagcgaaagtgcgggagtgcaggccggcgcgatcttgctatatcaccagaactaccgatagagtctatgcttccatgagaattacagtacggtgacaatgacggttgtcattttccgatctttataaagcgggggcgggggtgtagatggccgtagccgaagacgcgcaagtacgcgcagcgcgtagtatgaacgcgcaggtagtcatctacacccagtctacgaacaaataagcttgacttggacttaatttcctcaattctatttttatatgtgttctatctagggaatttaaaatacaagttctgtttgaagagcttcaaaatcttgaaacatcccgaccaaagaacttattcactgtccatcggaaagccacacgcaacttgttgcgccagctgatagacatactgatgtatgccatcttccagataagtgatgcagtacgtcccttgataccatctggcaggaatcgcttcggactccggtcagcgttacggggaatctgcatcaacgcgcgttcgtcaccgatgtatgccatggtgccgaggtcgcggaaagagaacggcggggtttgaccgaggtcattcttgttcaaacgctcagcgagccacttcgcttcttggtaggtagcctgtgctgtggcagggggggcaccggtctctggcatggcgttgtcacctaatgcgaacacgtcgtgaagaacggctgtctggcctgtttcgttttgcagctgtacccgcagatgtccgtcgacgagaaggggtccctttcggggggctttcttgaatttccacgctgcgtgttcggcgtccacggctttttctgaggtctcgatgctttggactgagtctgcggggaatgcatcgactgtgtcaagcgattcggtgaccagttttgtcatggcattacccgttgcccaaacacacattccaatgccttgctcgccgtcttcttcggtgtgaagagtcagacagcccttgggatccatggggtggggcccaggtgcgccaggggcaccccagcgcaagcttttaacatgatatgaggtcttgatatcaataccctcgctcttcatggtctccatcgcgtagcgggaaagcgactcgtcgaacatcgaaagcaccttgggtgcaacatcgtacaaagtgatcttcggcaattcatgaagactggggtatagcaacatcatatcggagtagatgaaatcgcgcagggatcccgcaagctcgataccggttggaccggctccgacaatggcgaagttcagcagccattttcgcatctcgggggaagtggttgggaggacagccagctcgaaacattctcgcacgcggcgcttgacacgtttggcgtcaccgatatctttgaaaaacatggcattctcccgcacaccgggtgttccaaacgtgcggctgacggcgcctaccgcgatgataagcttatcgtagggtacctcgaacacttctccctgttcccattgaagatgcggctccatggccggcttattcctcgtttccgggccttgctcggttattcggtaatcttgggttgtgcgaggagactcggtgacaccacttttgacgactgttgattcgactaggacggtctttcttttcaaatcgactgaacggacagctccttgaaagaagtcgactttggagcgcggatcacgcacgggctcgacaatgctggagaaatcgagagatccgctggcggtgttggtgaggagaggagtaaagacaaagtatgagcgaggtgaaattatgagaggtgcgtatttctttgaagaaagcttccgcgagacgttgtaaccaccccagccagatccaaggatgacaactcgttccctgccatcagactccttagccaaggcgggcggctcagcatgtgttgcgaggcatctcctgcttggtgtgccaactaccagggcagtgctagaaagggggagcgaactccgtacacgtagagcctcgcggcgaagaggaatcatggtactcaatggccgaatttgcatggtaatgcagaactaacgcagtgtatgtcagtagatcgagggtattatgttcaaaaaacagatctgagctactttgtaactcctgcgatgggattggtgctcgtagttaaggaaggtttcctcttccgctgacacatcgatgacttcaccgtcggcaggaccggagcgggcctggtccactcggtaggatccatattctatcgggtactagtgccgtagaatgcaggtgggaattgaaaggctgctattactgatccatctatcaagttcgtggacacccggaacccttcggagccagcggtgataacgggctgcacgtgccgccggagacgatagggaggtgccagtacatgttgttcattcggcaccgaaaggtttggcggatgtctataagtcgagcaaaagcattccgagggtaacttttgaaaaagaggagaataccgccgctatatgagttcgcggtgagtgtcatatgattctatcatatgatgggggttgacctcgggagctagggcttggcggaatcacatgaatttgatacaaatgtagtcccgagttatttaaggatcaccgagattccaccggcatggagcttggacgctcccgagattccaccgcgtcgaaacttccgtgtctccgagcttctaccgggttactccttagagcttggatgcagatttggttttctaggttccgggttgttttctcgcgttgtctcccccttttgttcgaggactcccaaggttgacagctgcccaactcatcagcactgcggagagggccagcactgcggaaggagggtctagttcaaggcttgtcccggtcataacacgtctagaaagcatccgggccactgtcacgacattgaagcggatcggtcggtccgttcgcatcaacggggattccaaggttatcatgcctccctttggcttcacttcataggcggtgagaaacgcgatgacaatagctgacacatcgtgcgtggcgtcgtgtggcgcagacgtgtatctggagtggcgcggccctttctgtgtcagaatctcggatttagggggagactacctaatcgggatgttctttttctccgctgttctaccccatgtatctttattcgcccctccgagctttaagttcctcgaaggtacggagatcatcgtttaattcatcgttatcaccgatatattgctccattgggatgaattctcggccccgagctctgctggcgtccagcaggttaggcagcgttgtacgtatacttccagggtggcggtttacatggctgcctgagtgtacaaccagttgtatataaagatcatgttgcttccgtgcatacctaatatcagatcaagtgtcttcactgttcttcgctttactttctcgccttttgatatcttccaacgtatcattttctcgcgcaagtcacatatcttacatcaaacaactacttcaagatggcttccatctaccaactcaaccaacctaccagtcagttttgggactttgtcaacggcaatctagaggaccatcctttctttgctcctcgcggccaccgcggacaccacggacgtcgtggacctcgtggatgggataccccccagcagagcgacaataccaaccgagacgctcaagcaggtgaaaccactgagcccaacgccgacatggagaaggacgaaacgtcagcatcggactctgactccccagacaacaaccatcgctgcgaccactgcggaaatggtaagggcaagtacggtagccgtggaggtcccgaccaccacggtccaggcccattccgtggcagaggaggcaagggcagacatggacatggccctcacgctggcccctacggccaccacggccctcacagcaccaaggaattctcacaggactctgaaacaccccaagcagtcggtgagctggccgacgcctctaaagagaacatcgaaacctcggcatcggactctgactctcctgacaaccaccgccaccaccgcccccgccccgggggnnnnnnnnnnnnnnnnnnnnnnnnnnnnnnnnnnnnnnnnnnnnnnnnnnnnnnnnnnnnnnnnnnnnnnnnnnnnnnnnnnnnnnnnnnnnnnnnnnnnnnnnnnnnnnnnnnnnnnnnnnnnnnnnnnnnnnnnnnnnnnnnnnnnnnnnnnnnnnnnnnnnnnnnnnnnnnnnnnnnnnnnnnnnnnnnnnnnnnnnnnnnnnnnnnnnnnnnnnnnnnnnnnnnnnnnnnnnnnnnnnnnnnnnnnnnnnnnnnnnnnnnnnnnnnnnnnnnnnnnnnnnnnnnnnnnnnnnnnnnnnnnnnnnnnnnnnnnnnnnnnnnnnnnnnncgggcctctgccccccctgacacccccccccccccccgccacggccgcggcggaaaattcaagaacaagggccatggaggtcccggtcaccatggaccaggtcccttccgcggcatgggtggtaagggaagacacggccacggccctcacgccgggccttatgacttccacggctacggtcatcgccctcacgccggaccttacgacttccacggttacggccacggccctcacgccgggccttatgaattccacggttacggccatggccaccaccacggtgccggtgccttcggaggtcctggacgcggtggaaagggctggcatggacatggatacggacacggtccccacgctggaccatacgatttccccggcccccaccacaacggtggacccttcggtttcgggccccgtggacagggtcacccccacaaaggaggccgcggcagacacagcggacctccacctcctttcggcggtccattcgacttcctgcgccagcttggtgcaggacttggcttccctatgaatgcgcctaccgcagagggtgttgacttcacgccctccgttgacgtcttcgatacccccgccaaatacattgtccatgtctcacttcccggagctaagaagagcgatctcagcattgactacgacgctgatgagtctgttctgcatctgtcgggtgttgtctatcgccccggtgtcaatgaggatttgcaccaggctcttgtaatggaagagcggggtcagcacgttggtgtctttgagcgcgagatccgccttgggactcgtgttgtcccggctttgattattgttgatggcatctcggccaagttggaggatggtgttttgaatgttactttgccgaaaattgtccaggaacctgaggttgggaagaagaaggtttttgtggaggatggtgccttggagaatgagaaggacgccatggtcgtcgatgagaggactctcactccggtggagtctgaaggaagcgaagttgacgatggtgagaccagagagtatgtcaaggttcctgtgcagtgagcacaggtcgagtttctgggtttctgagtttgagtttctgtgattttgggtcaattggagttggagttatgaatttttgatttcccttgtttaatatttgaaattgttcactagttatgggataataaatcgctgctcaaggtcgagtggcagaaacaccaattttgctcgtgctgtaggctcctgtagaccagagtaaatatttatcagtatgtctcatttagaatgaataaacagtctagatctagaggaatctagttcaggttcaaggctatgggctatggttcgatggttattgtcacgccgagtgctgtttcctaatataaagtccaaccgtgttccccaattagcatcaattaactaaatttctctcaatattcaactcgtcttattccaagtgatgcatttgggcgcgttcattgttaacccatgcacttcgtaaacctctctgtggcattccttctatttcctttatctctcgcagacagcttgccgttcagattttcctttgttggcctgcagggatgcttcttctactttttggtggatgagatctgatggagctatatagagagcttcatggcagtagctcgatcctcatcatccatccacttcaatctccagatttctggttgatcatcctttttcctagtctgaaaactatatcaccacgatgtctatatatatatatctgaggatacaatatttccctttcagccgctgtcatcctcaccatcttctccagcgctgcgactgctcactacaattatcagctcatcaagccaccatgctgccagcatcgtgacaaccaaaaacccaacccggactaggttgggcccggagtgaagtaccagcatggtgctagattccgcacccaacgcattgggatcggcagaataggtatgtcacggttcttgttttactctgtaaaaacaccactaactctcaactcacacaatctagagctagccttaaagattccctagcacagttgactctccgcgcatttgattcggcgatatacctaaatcctaaggacacagacggcccagtcgaccttattcacatcgctactattagccgcggctagaataagaccccctatcgcttccttataaatgaaaaccccacacatgcggagcacctgagcttgatgtcaattaagaggataactacgcccctagtgagaggagatatggtctcttttctcttacattgcgatggtaagtgaagcccctgtcaccaaaaccggaccgtaggcgtttgctaaccacatctcatcttagatgagcttcatgtatacaagaggcgggcagaaaacagcccaaaccagataaggggcaaaataagtacaatgccgaagatgagcctcgccttctgggaagcgtccaaaggatcattgctcgagtccatctggtgagcaaccgacagattcttcctcgtcggaagaagctgcacccagagtttcggcacgtagtaaagcagtcagggatgcggtatgttgatcgagatgatctgtgatatataatgctaactttacatatttaggtcttggctcgagatgggaatagatgtgttctctcgaggttcggtgtacatgggttacatgtatctcacattcttcctttcgagttgaacaatggctctatgcgtgaaacagactcgaacataaccttcatcgtccagttcatcttcttcggcttcttcgtgatggttgcaaagagcttgcacttccgcatctcgcgtcagtcaatctccagatcgcagtcagatcgtggttgccgaagtgatccccgcattgatggttgggaacttaaagagcgacttatatgatccaaacaaagcctagtccggagagatctggatgaatacccgcgtacgagcaccaatcgattaggataggacatagcagcagtcgaaatcgacaaagatagagtacggcccgtgagctcttcatgtacatctttgatggattgtcggtgatctctgatacctttgacgagcatatcgaacatttaacccttgttctaggtgtgcttgggaagcacggagtctccttggaacccaagaaagcctaggtcgccttccccgaggtctcacgtttgggccagcgggtagacgcgttaggtatgtacgccggaagacaagatcaaagccattgccggtctggaatttccccagacgttacgtcagctggagacatacctcggtatgaccggcgctttgcctcaatacgtgcctcactatgcgaagaagtcagaaccgctccaggtcatcgacattttgtgtcacccgaggtgatgcatacttaaatgaacttctcaattctcatctgaaacttaatcacttttaacgctatgtagaaaacgggtatatgcaacttttgcctactcgaaacagcaaataatcacaatatccaatcattagatgccataaatcatatcatcgtaatctggagtccatactaggccgcaggtcgtaacttttccgcatagtgccattgctcaatccaccatatagatcaggccgcctcgaggcccccgtgccgcgtgtagaaacaggtagcagaccaccaccatattccacatcgacactcctcctcatgcgcggtaaactcataattttctccatctccaaagcctggagcgtttcctcgcttcgttcactcttcgcagacaccttcgcccggttagacaaccagcgtcgactgcccacgcggaagaaacccccgatatcatcaacggtgagagcgacccagacaagcgggatggagattgcaaagccaataccaaaggtatactttgccacatagccgagattcaagctctcgaattctttcaggttgatcgtgaagatggaggcgataaacgacaacggcaggaagacaatagtgacaatagtgaagaccataattgtcttactctggcgggttgtaccggcagcctggtcacgggcgaagcgggcctcgaacgcgttcgcgtgtttctgtttcagatcgagcaggtccgtgatggagtggtagatgcgctcggcttgtttatccatgcggtcaatatcctttaggtgcatgtcgatcatgcgctgctggtctttgaaccgtttcttgacttcgaattgggaccggtgctggccttgataggtctcgcagacgacttcttggaagtcgagcaggacgttgttctggtgctctagcaccgtccggatcatgttcagttcgtctcggatatcttttgtctcagctaggagattggtttcctgtccgatgtccaggagtcggtcgacgaatagtggctggccgtcctcgtcgcagtagttgctgctttggtcttgctcgtcggtcccattgcaggactttggcggagagctgaaggagccgttcagcttgcggtgacttttcagccactctgatgcctgcccggaggcgtggttgaattggttaaaaagcacggtctctttgtccgtggctatacctatggacgactcgaacatatctaggaactggtactcctcgtcgcctaggcggtgtcgatcgaagacccccgagcatcgattggtgattatcatggctagatcatagacggatttgacagggtcgcgggttttggaattgatatcctcgataattccatccagcacattaagcggatcattcttgggctggtcccatctctgcgggaaggccgttacaatcagattcgtgcctagaacccacatccagagttgatccaccatgaatatcttggggtctgcccccattccggggctttttgtttggtaccggtacacaacttggtcctgatcacgactcttggtatcgatattcgggtagaaaaactggtccagtgttcggcggacatggagggaggtcgttgaggacgatagatgcgcatatatgagtatttcgtctcttgtgcgcgttctctttatccccctgggtataaaatcaagcgtttccgctcgggagattgcatcctgcatctgttgtctgcgctctgtggtctcgaaatgtagatacggcatgaacacgcagacattacatgcagaaaccagagggtgagggtctttgcaaaaggttgatgaagacagtgatgacctctgtttctcgccctggcccgacttccccttcgtctcctgcttgggagtccctggtacgctacccgacttgccgcgcttcggattgttcttgttcttttttccatgcccttcgtcgtgaaaataagaatccgccttttcaggcttgctgcctgtgcctttttgcttgcgggcagggctatccatggcccttacctgcccattctcagacgcaggctcctccggagtctcctcttcatgtcgacgcagcatcgtccgcggcgtattctgacacaacggtcgcataaagtgcgaatgagtcctttgaccccgatgctgatagttgaaagacttctccagccccttgaacccatcaacatcatgtgcgccctcctcaataaaggacttggtaagcagagcttccacccacgccatattgttcgccggtaagtgaatccaccggaaatcagtcccacgactatcaaccggcacagtggtaacagcctgtttcctaggattctccggatccctcccataaagcagattaaataccgacatgcgcttaacccgattctcattatggaagtttccaaagtcaacaacagtagcatcgaacgccgcacaagcctccttgacaccatcagatagactgtcgacattgttaaacggcgccagcaacagcacaatatccttccgcttgaactgcgccgcacgcagaaacggcgtactgccaaaattatccctaacccgacgtttcagatcaggcttctcaagaagacactgcacgacctcgcgatggccgccctgcgcagcaagatgcagcggcgtaatgccattcaaaagctgtgcgttgatatgcgcgccttcgcccagcagaatccgcacaatcgcctcacaccccttatcacaggcattatgaagcggcgtccatccaccatcactagcagcattaaccgccgccttgtgcgcaatcagcagctgcacgatatccgcacggtcatgagccgtagcaacatgcaacgccgtcttaccacgcagctcaacggcatcgatctgcgcccccagcccggacccccgcacctccccctctttctccccctcgccagcattcctcgtcaacaacatctccgccatcctccaattccccgtcgcacaagcccaatgcaacggcgtccgccccagctcatcctgccccgcaaccccatcaatagcacactccgtccgcaacaacaaccccacaacctcctccccccacccccaccgacaagccctatcagcggcgaggttatgcaacgcgttccggcggcgcagatcgcgctggttcacgtccgcgccccgcatgataagcaggtgcaggatatcggcgtggttcttccacgccgcggtcatgagcgccgtgnnnnnnnnnnnnnnnnnnnnnnnnnnnnnnnnnnnnnnnnnnnnnnnnnnnnnnnnnnnnnnnnnnnnnnnnnnnnnnnnnnnnnnnnnnnnnnnnnnnnnnnnnnnnnnnnnnnnnnnnnnnnnnnnnnnnnnnnnnnnnnnnnnnnnnnnnnnnnnnnnnnnnnnnnnnnnnnnnnnnnnnnnnnnnnnnnnnnnnnnnnnnnnnnnnnnnnnnnnnnnnnnnnnnnnnnnnnnnnnnnnnnnnnnnnnnnnnnnnnnnnnnnnnnnnnnnnnnnnnnnnnnnnnnnnnnnnnnnnnnnnnnnnnnnnnnnnnnnnnnnnnnnnnnnnnnnnnnnnnnnnnnnnnnnnnnnnnnnnnnnnnnnnnnnnnnnnnnnnnnnnnnnnnnnnnnnggggcaggatggcggggtgtttctcccccgcggcggtcatgagcgccgtgcggccttctttgtcggcggagttgggacaggcgccgtggtcgagcagcagacggacgatttcgtagtggtcgcgctcgacggcgcggaggaggggtgaggcgcggttggaggggacgtcggttttggcgccgtgcgtgaggaggtattctgttgcggcgatgcaggctcgttcggcgctgcgcattaggccgatgcggaggaagttgtcgtttagttggttgtactcgtgggcgagggctattgtcttttttagggagtcgatgtcgttggattcggcggcgcggaggagccgtggctccaggcgctcgtggctgtcgcttgttatgcttgaggctggcattgtggttgaggtgtgtagtggtgagggaattgcggtattagattatatatatggctgtgtatagatgtatagcgtgtcgttaatccattgctgtcgtttcttggtgagttattgagactcttctagttttccctccccggtaggataagcgtttggagatggatggggaggagaacttgggacaaagctagacttgaatgaatcaagctcaagcgccagcagatggcccttttcccggtctggaaaggatctgcggacctgaaagtacttcgtttcctcagccccaatcctatgggggattttgtaaccgacggcgaaaatgaggctgtgtggctgatccgctcgtatcgcttgttttagtaggtttggccccagcatatgcatgtttcaagatttgactagttggatcctttgggaaagacgacagaaatttctgtaagagcaggtaaatccagggtatggcagccttggaaggtccaatagaatgtatgttgtaggtacggagtagagcctggttaacatagaattaagaatctggtaactcaagccgtaaccatggatccgggacaactcaatggccacagaactacaaatccaaactatatacagccagtaaacctcatacgaattgtacagacgttagaatctatatttctatcgggcactttctagtcacaaactacgggggatgtggcggggaatccaaggcgaaaagaaaagggaaaaattaaaatgacaaggtgaaaagaaaaagaaaagccccctccttcggagatgctgatgccgatatgctgataattatgatgtgcttctcccatgcatgccgcccccgatgaattaaaaagttcttgctttttgttttcgcttccctgtgcatcgcgccgatcccgcccagtagtttatgtcacaaatgcgcctatcaacagaaaaattaaacggtcaagagtgtggaaatcagaggcacaaacgagtttgtattctgaataagcagaccgcatcatagtgccatgcaatctaaccatagagagaagacgcaagacaaatggtatctagtgcttcttcttgtccttctccttcttcgggacttccttgagaatatcgtcgaaactcatgttcgggttgaagcgactattcggacgtgtaggaggctcgataggggcaattcctgccgggaggggcaaggcttccaacccagggtagaatgagtggcgatgctgctcggcccgttgggcagcggcaggcgagcgcgttcgtggaatggccggaggcgggggcgtgagcccaccagggaccatagggtagggatccgaagaagagccagccgatgattgatggcccgggtaaggtgatgatatagaggactcctcatcatcgtaggtggcgtcttccaccataggtggatcgaaaagagcgcccgcctcggcccactgctcggcgacttgccagcaatgactgcggcggtatacaccttccactccgttgatgactacgtccgatggcatgctaacaacgccagcaccaccggcaactccgaaccagctgcgagcagtcttggtgtcattatgaatccagggagcaccgccacgtggagcaatgcagaggaaatactccacgccctcgttgaagtggacttcagggacatccaccaccagcatgggcagggcttgaatgacggcgtagaggaagatccactggccacatcggaggtcggtaatgtcattagcattcttgccgtgcgcggaacgacgctcgaactgcatgaagctctcgatgaaaggagtgggtcgcatggcctcccgggtataagatcccattaggacagcattgatgtcggagtccttgagctttttgacgctctgcttagcctccttcttggcatccatcggtttccgatgtaagggctgcagtgaaggtatctgtggaatgtcgaatggaatgggaggaagtactggtggtgtgctgcggtcatattcggagaggacctgccgcaaggcacgaatggtcatttgcttgtaatcagatgattctgtcgtgtcattgcccgcacccgaaacatcaattgtacgcgtcgtcagagacgtgcggtcaaccattaaatcgtagagatcggtgaagtcgtggtacaaatccagaaggagaagacggttgagtccgttctcctcaaactcgttcttcttcgaccgagccttgggcggccacgagccgtatttctctcggtagtagtggattgtaaagcggcggaattcatggaatcccgtcctccagttcttaaaacgcacaaccttactttccggggaagtagtcgagttggcaacacccgagaaaacggaggggaaatcgaaatcttccagtttgccgtagagaccgcgcagacgggtgtccaaatcaatgaacgcgcgctccatgcgtttctgcgtgatagggtggatgaaggtatatttagggctccgcagttgcttgagctcatccagctttcccacaccgtggacaaagccctcgacgtacagcggatagtggcgcagacgctcacccaaaacgatggcctcgatcgtcttctccctgcttcgacggacatctgcgaggcgcaattcttcgcagtagttgctgaaactcgaggtggcagtctcaccaaaattggacgcatccaagttggagaactcaaaccgggccaaaaggacggccacgtccatgaaaatagagaaaagagtggatgacttgggtgaggcgattaaagactggccgagcaggaacgcgaaaaggttgcggaacaaaagaagagtctctgtgtcctctggaccgagccttgtttgtgggttagacaaatcgcagttcagcggaatggggaggtaaagatggagttcctgcacttcctccggggtatcttcgaatgccatcctttggcttcccgcactgtcattatcgttgtcattttcgggctgacggtccaccggtgacatagggggggacatgggagacccgggattgagtgacatcgttctagttggctgctcaaggccgctcttgccatcatttccgcgggctagaaaagtgagggagggtgattcggcaaatatggtggaatcgaccttgaaagacggagggtggccggtagtctgggggaacatgtacacataagtgtcaccttgctcgttccacagttcctggatctggaaagtgataagaaatgattaacgtttgcacctcaaaacaagtgatttcgcgtctgcatacctgttctcctctagacaatggacctaaatcataaacaaccttctggtccagtcctgcgatccaagcagccggaagcattgcagcaggccgcttatcggttgagctggcgcgcgaacgaccgggcatccagcttctgcgctttgacggtgtgctagggcgggaatctgggttggatccagggatggtcaaccctgccgagctggagggcctgctcatatcacggcctctgctctgcggacggccaatgggcgaactcggcacgctgttggccagatcctggttcacctccagcagtgacggtggtgggggtaggctctccatatcgaggctatcgggcatggtccttggctccgaggcatagacggcattgggggttgagacatggcgagtgggttttgagctgctccggcttcgtttgtcgctaacgttttctgacgaattcaacactggcgaagacgcaaccgaggattgggattcccgatcttttgatcccagcgagaacagagacgaaatccgcttcgccgacttaacgggagccgacaacatcttgggtgatagagatgttgggagaggatgagtgttttttttttcggggatgagagcgacccggaggtagagaaggttaagcccgcatgtgagccctgggggaatgaagtgtgcttggcaggtgatggggggaggcggaggtttagggggttgtggaatggatcggcaggagggattggaagaatgataggaaacctgacaccgttcactgacgagaggcgaaaaattagaaaggaagagaatgacaaaagggagagaagctcaggagaagatgagaataaaaggcacaaaagctaatatcggagccttaatttttagatttcactattatttcacggttttaataataatttacgaatacatgccagatgcataatacggcctattgccaataatagaacgagcacgatgagacgagtggttccccggctgtgcatgtcttggatgtggagacaataaaatacgcgatttatagaagagaggtaggtaaccatattcaattgcgttatagggagtgtaggagaaatggaaacgatatccacgtctatcgattgtgtatacatgggttggagtaaacaaataactgtacaaagtgcttagggagcataacccaccttgcaaggacccaataaaagcctttatataaaacacgatcatgccgctgtgatccgacataactggggataccagggtatgcaccgtatttaagaaaaccagtagaaagtagtagggagtatgacgagacgtacagagttccatccgacaatatcatagttgccctcccccgtgtaaaatttgatggcaaggtcgggaaactcgcgaccgagggtgacagtcgagggaacaccggggttttgaggccgacgcttctcaagaagtcggacttggggtatggggttttggatctttgtgcacaatttggcagtcgtatccatcaattatggcggtttggccgagtggtctaaggcgattgactagaaatcaattctcttcggaggcgcatgttcgaatcatgcagccgtcgtgctgtatccttttttttggacaatttctgacaatcttttttatggttttgctgctgcggagtacatggacgtaattaacagaatttccttaatcctagatttactatagccctcgagctatctaggaagaaaccaactccgttgagccgaatagtctactaagatttcatttcttatggagatatgtttcacgagagttcctagtatttatttttagcgagaactattcaggctagccagcgtagcatacacaattcctatcagctctatgatacacatttggagcgggctaccacacatttggagcgggctacctatctaatatggcggtttggccgagtggtctaaggcgattgactagaaatcaattccgttcgcgggcgcatgttcgaatcatgcagccgtcgtgctatttcgttttttaatattttattgacaatacatcatggaggacaccgctattccagtaccgccttcctaatcgggttctactcaggcgctaagcgatattcaaaatattcaagccgtggaagttcctggccaactaaatgcacccacttacaacaccattgcaagaaccattgccggaaccatgccctggaatccacgtcaacccagtatctttcacgatgagtcatggcctacaccatggcgttcatctgaattcccacccgaagaaacttttgtcgaacgaatcaatcgacagcatgcaaatcccgagtgggagtctgtaccgcacttcttatactacgagtctggtaggagtgggggttggccatggggatgggccatctatcgtacctcctatctcaacacttccgatcaagactggactagagctattgaaaagctcgacgaggcctgtatggctgacctggagttttacgagcgcagctggcaccgattcgacctcaaatgcgttgaaatggtccgcgagggttatcggaatgttatctttgaagaccccgcgttagagggcgcgtcggaagcggttatccaacgtcgacataaagaatgggtcgaaagccatggcctccgcatatctagtggcattcctcgccttggttacgcacttttgttagatgatcgctgtatacgatcaatcttggccagtgcggcgcctagaaagccatctgttatcgaacaggggctaccatggccaaagattaacgataaaccgggggggatggtcggttatgttaactttatcgactctttcttccgccccgaagacccggaaaatgactatggagagtactaccgtggattggtccgtgttcatttggactgtttagcccattttgctatctattgcgaggatcttgagactggagagcaggaatggggtgaatatgggatggacatacctgacaatgtattttatacagatggccattgctcaaagactgagttgaaagaaatgtttctttcttccccagatagaaacgttgacagaactgcgagtgtgactgagctcgagtatatcgagcgccaggatatggagaacttagcattgagtaatgtgccgggttctacctaacactggaatgacaccaataccaacggcttttttaatccctagataatccaacagttatcctctttcaaaaggtctttttggtcttttctaggatatgttagaacatgaccactaactacctccgaatattattagtagggaacctttgatacaagctatttctagacctttaagagactgcatacatatttgtataaatattgattcatggcagctgattaacctcccggcgaaaaacccggtgggcgcgatggacccaaaaacctccgtaaagagcaaactatgacaaatcagaataacatcctagtgatttcaagagaatcattggcgttgagaacgatatcgtgttcccctggtcctgggggtcgatcgtaaatagcaacgaatggaagacttgacggggccccgacaacgttgttggactgaacgtagacctcctgcaccgagtatggctgctgggtgggaatcgcccggatagcaagtgtaaggggggctagttgacatttttcaaaggtgacttcagtcaaccccatcgagataataataacaatgcgcactagaccccggggaatgataagccatctcttagcgtcttcgcgaagccgagggagggatttagaaacgcccattggggcagcgatctggtggtaagaacgcatggcctccctgtttacctataccggcggcnnnnnnnnnnnnnnnnnnnnnnnnnnnnnnnnnnnnnnnnnnnnnnnnnnnnnnnnnnnnnnnnnnnnnnnnnnnnnnnnnnnnnnnnnnnnnnnnnnnnnnnnnnnnnnnnnnnnnnnnnnnnnnnnnnnnnnnnnnnnnnnnnnnnnnnnnnnnnnnnnnnnnnnnnnnnnnnnnnnnnnnnnnnnnnnnnnnnnnnnnnnnnnnnnnnnnnnnnnnnnnnnnnnnnnnnnnnnnnnnnnnnnnnnnnnnnnnnnnnnnnnnnnnnnnnnnnnnnnnnnnnnnnnnnnnnnnnnnnnnnnnnnnnnnnnnnnnnnnnnnnnnnnnnnnnnnnnnnnnnnnnnnnnnnnnnnnnnnnnnnnnnnnnnnnnnnnnnnnnnnnnnnnnnnnnnnnnnnnnnnnnnnnnnnnnnnnnnnnnnnnnnnnnnnnnnnnnnnnnnnnnnnnnnnnnnnnnnnnnnnnnnnnnnnnnnnnnnnnnnnnnnnnnnnnnnnnnnnnnnnnnnnnnnnnnnnnnnnnnnnnnnnnnnnnnnnnnnnnnnnnnnnnnnnnnnnnnnnnnnnnnnnnnnnnnnnnnnnnnnnnnnnnnnnnnnnnnnnnnnnnnnnnnnnnnnnnnnnnnnnnnnnnnnnnnnnnnnnnnnnnnnnnnnnnnnnnnnnnnnnnnnnnnnnnnnnnnnnnnnnnnnnnnnnnnnnnnnnnnnnnnnnnnnnnnnnnnnnnnnnnnnnnnnnnnnnnnnnnnnnnnnnnnnnnnnnnnnnnnnnnnnnnnnnnnnnnnnnnnnnnnnnnnnnnnnnnnnnnnnnnnnnnnnnnnnnnnnnnnnnnnnnnnnnnnnnnnnnnnnnnnnnnnnnnnnnnnnnnnnnnnnnnnnnnnnnnnnnnnnnnnnnnnnnnnnnnnnnnnnnnnnnnnnnnnnnnnnnnnnnnnnnnnnnnnnnnnnnnnnnnnnnnnnnnnnnnnnnnnnnnnnnnnnnnnnnnnnnnnnnnnnnnnnnnnnnnnnnnnnnnnnnnnnnnnnnnnnnnnnnnnnnnnnnnnnnnnnnnnnnnnnnnnnnnnnnnnnnnnnnnnnnnnnnnnnnnnnnnnnnnnnnnnnnnnnnnnnnnnnnnnnnnnnnnnnnnnnnnnnnnnnnnnnnnnnnnnnnnnnnnnnnnnnnnnnnnnnnnnnnnnnnnnnnnnnnnnnnnnnnnnnnnnnnnnnnnnnnnnnnnnnnnnnnnnnnnnnnnnnnnnnnnnnnnnnnnnnnnnnnnnnnnnnnnnnnnnnnnnnnnnnnnnnnnnnnnnnnnnnnnnnnnnnnnnnnnnnnnnnnnnnnnnnnnnnnnnnnnnnnnnnnnnnnnnnnnnnnnnnnnnnnnnnnnnnnnnnnnnnnnnnnnnnnnnnnnnnnnnnnnnnnnnnnnnnnnnnnnnnnnnnnnnnnnnnnnnnnnnnnnnnnnnnnnnnnnnnnnnnnnnnnnnnnnnnnnnnnnnnnnnnnnnnnnnnnnnnnnnnnnnnnnnnnnnnnnnnnnnnnnnnnnnnnnnnnnnnnnnnnnnnnnnnnnnnnnnnnnnnnnnnnnnnnnnnnnnnnnnnnnnnnnnnnnnnnnnnnnnnnnnnnnnnnnnnnnnnnnnnnnnnnnnnnnnnnnnnnnnnnnnnnnnnnnnnnnnnnnnnnnnnnnnnnnnnnnnnnnnnnnnnnnnnnnnnnnnnnnnnnnnnnnnnnnnnnnnnnnnnnnnnnnnnnnnnnnnnnnnnnnnnnnnnnnnnnnnnnnnnnnnnnnnnnnnnnnnnnnnnnnnnnnnnnnnnnnnnnnnnnnnnnnnnnnnnnnnnnnnnnnnnnnnnnnnnnnnnnnnnnnnnnnnnnnnnnnnnnnnnnnnnnnnnnnnnnnnnnnnnnnnnnnnnnnnnnnnnnnnnnnnnnnnnnnnnnnnnnnnnnnnnnnnnnnnnnnnnnnnnnnnnnnnnnnnnnnnnnnnnnnnnnnnnnnnnnnnnnnnnnnnnnnnnnnnnnnnnnnnnnnnnnnnnnnnnnnnnnnnnnnnnnnnnnnnnnnnnnnnnnnnnnnnnnnnnnnnnnnnnnnnnnnnnnnnnnnnnnnnnnnnnnnnnnnnnnnnnnnnnnnnnnnnnnnnnnnnnnnnnnnnnnnnnnnnnnnnnnnnnnnnnnnnnnnnnnnnnnnnnnnnnnnnnnnnnnnnnnnnnnnnnnnnnnnnnnnnnnnnnnnnnnnnnnnnnnnnnnnnnnnnnnnnnnnnnnnnnnnnnnnnnnnnnnnnnnnnnnnnnnnnnnnnnnnnnnnnnnnnnnnnnnnnnnnnnnnnnnnnnnnnnnnnnnnnnnnnnnnnnnnnnnnnnnnnnnnnnnnnnnnnnnnnnnnnnnnnnnnnnnnnnnnnnnnnnnnnnnnnnnnnnnnnnnnnnnnnnnnnnnnnnnnnnnnnnnnnnnnnnnnnnnnnnnnnnnnnnnnnnnnnnnnnnnnnnnnnnnnnnnnnnnnnnnnnnnnnnnnnnnnnnnnnnnnnnnnnnnnnnnnnnnnnnnnnnnnnnnnnnnnnnnnnnnnnnnnnnnnnnnnnnnnnnnnnnnnnnnnnnnnnnnnnnnnnnnnngcgacgtacagctgggatgagttctttgatgatgctgatactgattgagtgaaagggtgagcacttgggcaagatgtttaagtccaaaatcggtagtattttttgtacaaattccccttggattgcctcgggggtagataaacattacagatttccagtccaacatgtgggaaattgaggggtagtaggatataccagagatagtgagataataagagttcttcggtattcatgatattataataagactacgtacggttcgctgactgcattcaactgactattgatagtacatttattatctctggtttatagagccaaagttcggatgttactattaataattacggcggtttggccgagtggtctaaggcgattgactagaaatcaattctcttcggaggcgcatgttcgaatcatgcagccgtcgtactgtatcttctttttatttttattatttctatcttacccgtcctacattactactctgtacagagtagttaagtattaagtggtctgtccaaggagtttttgttttgtctcttttcgttgggatcatatacaaccaaggatacaaggtataaatcttaggtgctggtatgaaaattggagtaccgccttcccaatctgatgcaaatacaaattctgccatatattctgcctacttttgcattttaatcacaatatttaacctaatccttacagaggaatgaagtagttgataaggcagttgacgatgaagcatttgatgcaagatatgataggagtaacttaaatttgctaggagtttacatacgaaatgtaggtacctgtcatatgcagtttaatacaaaagaggtttacaaattaggaggcggtgaagagagcggtaggcagaagcaagattgttattcaaccaaattacgaaggcggtactgaatcctcaggcaggagagtgtgtttatactgaaagggggatgttctgacaacaagggggatacatagtacattttctcaattagaaaaattacaaaaaaagaattatagcacgacggctgcatgattcgaacatgcgcctccgaagagaattgatttctagtcaatcgccttagaccactcggccaaaccgcctaattattaagatagattcaaaaatttggatctataagccagggacaatcaatgtaccatcaatcatcccatcctagtaactagtgcggagtaccactttcaatattgctcctctgcacaaagcatttgtactctatactttgtacacatagaataggatagttcttgtttcgtagtaatatattgctctacaggcattgggttcgtatttggattagatctatggtgtagagtcgttaatacttcatattttttttttatatacacctagaaacatagcatattgtgtgtaccaggtctggctaagaatgtataaaagattacctaggtgatgtggtaggctttttgtctagtagtcgaaaaattcaatactaggtttgagtcgttcaaatttcgtatgaaatggacctaaatctataaacatcatgagctctattgattttaattgactatagcaactgcaaactttgaggcctcgagaggggttaggttattcaacctgcatataccaccgggtatcgccaggtagtatataagatactctttcttatatgacatagaactacctatataatgggttcaccttactactttcaaccagacttcgacaactgataaaggcctggtcatccgtatgtcttaggatatagaattcaggcgtaacattatcgagaacgaatcacctgtagtgtgctattatttgtcatatgtcaggacttagaatagggaggcaaagaccaattagtcaatagcctgttcatatttcatatcgattactaaagacaccgtgaccattgaaccttggaacctctattattccccagtgtctctgcacttttgtattagtacctagtaggtaccatgtcgggtcagcaggcgtgatccctaggctgagtaacatataactgagatatattccacgcttagtacgatcgagttatacccatggattcctgctagtaccttggtaggtgcgcagcccaggtgatgggaaatttaaaaccttggatactgtactacaatatctacacatgtacccactatggatatatcccagtacaagagagcaacattaaaaccttggaactgcccaggtaggacctaagtactaaatcaagagcatccaatgttatttttcataaagcgataggttcctacttgtttctgctactaaatttgtgaactgatatcttgacatggatactcatggttatcaattgctagcagagctatgaatacgttatgaacatgatttgtcatcaattacggcggtttggcccnnnnnnnnnnnnnnnnnnnnnnnnnnnnnnnnnnnnnnnnnnnnnnnnnnnnnnnnnnnnnnnnnnnnnnnnnnnnnnnnnnnnnnnnnnnnnnnnnnnnnnnnnnnnnnnnaccagccatactcggtgcaggaggtctacgtccagcccaaccatattgtcggggcaccgttaagtcttctattcgttgctatttacgaccgaccgccaagaccaggggaacatgatatccctctcaacgccagtggttttcttgaaatcactaagatgctattctgatatgctctattttgctattgggctcactacccatcttctctagatacttcttcgattttctgtgtatcgttaattggaatatttctacaaagaactgtacctctattgacctaaaatctattccatctattagggatctagtacgcatattatccttaatggtccgagctattatcacgttgagcttctcgaggtcgaagtagttcgtgaattggtttttttttgtctattgtgtgccaatagtgttttatagtacgaaaagtggatgtaatttaatagatacgtaattatctactactccgtagctaggaaataattggagcttttaaacgagagacctaattagtatgtccatacggagtactctgtttcttcgtgcgtgtaaaacatgcacgtaatcagtgtgctttgtagtggctaaggtggccgctcactatatcaataatggcggtttggccgagtggtctaaggcgattgactagaaatcaattccgttcgcgggcgcatgttcgaatcatgcagccgtcgtgttcttttttttctttcatttttatactcgatccatgataccgcatgcttacaaccttaccgtgttcttattttttattttcttacaatacaccatacatggaggacgccgctattcctggcctctacatagataccaaccaataccgtctctgtgcctgttaaccccctcgaaccattcaatccccgatctcggatgcatcggtgcccacctcgccacatcaaccgtggaagcccaagctcttacccaagcattaatgctagttgggttcaataacacgcaattgatattcatgaactccaattgacatcctattcgtcatgacactcaccgtttcccccgaccagcccattgacctccaaatcggctggcccaaccccgcgctcctccccgcctccatcctttccgactccgctacgaccgtattatccactccctccattgcaaacccagccctcctctacggccccgacgaagggtacggaccgctgcgcacacacatagccgcatggttgagtgatttctatcagccccgcgagccggtctcagcgcagcgcatctgcatctccggcggggccagccagaacctagcatgcgtgctgcaaaccttcacagacccggtctacacgcggaatgtatggatggtcgcaccgacgtaccacctggccgcgcgcatcatggaggactccggcttcgccgggcgcctacgcggaatccccgaagatgacgagggcatcgacatcgcggtgcttgagagcgggctgcgcgccgctgaggaaatcgccttgcgcgctggaaacaccgagccggtaggacaagtcttgatcctatgactgagtgcagtcactgtgccatgccactgtaccatcatttgttgagttctggactgatactgcccctctttccctgcagaaaatgaaaccgcccaggccctggcgcaaaatctacaagcatgtcatctatgctgtgcccacgtttgcgaatccctcggggaagattatgtcgctgcggagacgggaggcgctcgttcgtctcgcccgacagtacgatgcgctgatcgtgacggatgatgtgtatgatttcctccagtggtcggccaagccggagggagaggagaattccggggaccgcgcatgtgttccgcgtattgtcgatgtggaccgctacttggatggtggtccacaggatgaatggggacacgcacttagtaacggcagtttcagcaagctgatcgggcctggtgcccgcaccggctgggcggaggcttctgaaaaggttgcatatggattatcacaaacgtacggggcactgctgggatgacttgactgaccaccccccccttctcggatatggaatcgcagactgacccgatatcgcttgcagaggctcttcccgatcgggcggcgctccctctcatttgtgcgccgctgtcattgaccagatgttccctacaggcatcattcagaaccacatccgggacgtcctccaaccgaaatacgccgagcgctaccacaccctgttagcagggatcaacgaacatctcgtcccgctgggcgtcacagccccaccaaccgctgccgcggccggaggttactttatttggattggtctaccagcgccgttgctcgccgccgacgtagcccaggcagcgctggatgaagaaaatctgcgtttatcgccggggcatgttttccagatccccggagacccgcaggtactcgatgaggagtttgcagatcatctgcgcctctgttttgcgtgggaagagccacgacacttgagcgagggaatgcgtaggctagcgcgtgttctccgccgtatgactcgtacccaggtctaggtattgtgcgccacttcacccacttcacagccactccaactggagtgtccactagacgcgtggcgcatgaaaagtacataacttcaacatatagacaatttacaacgtagccttgccagctcataaaaaccttcgagttgggtattgtacggagtactgtacattttatatcgtaacgttgaggctctgcgttgggcattactacaacatagagacgcgagttggctgggcccagggttgggccattttcagaacccaataccgccagcacattgaaagtcatgtacaaaggttgtataattctaccagagaacaacaggggcaatactaattagacacgagacaatttaggatcagaggggcaagccaatcccgagcgggtcctccgactcagggggagtaaagagcaaagcttggcctcgacactttccccctctttatttgaatcaacgccaacccttaagttgaccgtcggaaattccagaggtcgtggccttgtcctgttatgagcttggcttttggttctccgtcatcaggaatccttcaaaccccccggaatgttcatccataacttgaccccctgacaacacgcgggggatatacgccgctttgactcgacgtcgagtcttgtgctacaggtggaattacacagacacagatacatacacagacatatgcaaacatgcattttcaagcaaaaggaatgaacagccctcgatctgcaataaaaaacaaatacgatgccagttctggggaatcgcggtatcatcctctcttctcttctacacggcctgaacaaagggatccactcgagtcaagggcatggtgatacgcgacaacgtgcaatgctcgtcctgtccccctgtgagcataacccgtcgcagatgattggaatggatgaccgacatgccctgtttggggtatgaattcaggttatatagcgcgtagacccgtagtctgtttattctcgtctgaatgctgtttgtgctgttctaccccgtaccctgaacagattgacctggaaattgccaaccactcgaagcgatatctaagtttcgattcgaaacatttgcaagcgccagccatcttcagcgtttcaactgcagaccaccacgtttcaagcgaagacgctgtcaccaggccgggctttctgattggtggggtgtggtggactttagggctgtggcgcgtgtgattggctggaaaggggaagtttgcaaacgctttgccttataggtatgattctcctcccgtctctatggtcgtggcctattttgtgtcgttctttccttctcttcttcatttctattcattccattcattcattcgttttttcattcatttcgtcgggcaccactctttgtcctgtctctattttgggaaggaaccctgcattggaagattcactctttaaatcttctttgctctcctgcatatcgctgctggtcaagcgttggactcgattcttattccgatatccgcagtactggttgctgaactatctcattccctagacatacttctttctacttcgctgcaggttcagcgttatccattttcaatatggccgttctacaaacctccatcgcgatctttgtcgcccatatcatccttttgctcggtttaccagcctctttggtcgcagctgtgccactctccgtgcctgtatctcctgtgaacaacgtcttggccactaccgaaaagagatccacctcaagctactgggtcgccaatgttgagcgtcagggtgttgtcccctttgccacgagcaccgactacaagatcttccgaaatgtaatggactatggtgctaagggtcagtcattcatcttacttctataccctcgggcaatatgctaactatgtcccaggtgacggttctactgacgacactgtcgctatcaacaaggctatttcttctgggggccgttgtggcaagggctgtgattcttctaccaccactcctgctatcgtctacttcccccctggtacctatgttgtctcgaagcccatcgtgcagtactactacacccagatcgtcggtgacgctgtcgaactgcccgtcatcaaggcctccgccaaattcgcgggtatggctgtgatagatgccgatccctacgaggacaatggcgacaactggttcaccaaccagaacaacttcttccgcgccattcgcaacttagtcattgacctgaccagcgtcccagaaggctccggtgccggtatccactggcaggtcggccaggctacgagcttgcagaacattcggttcgagatggtcaagggtggtggtgacgccaacaagcaacagggtatcttcatggacaacggatccggtggtttcatgtccgacttgactttcaacggtggtaactacggcatgttcctcggtaaccagcagttcactactcgtaacctgaccttcaacggctgccagactgccatcttcatgaactggaactgggcctggactttcaagtcagtccagatcaacaactgcgaggttggcctcaatatgtctacctcgccttccaaccagactgttggctccgtgttgctgctggacagcaagctcaccaacacccccactggtatcgtcactgcctggactcagaagagcatccccgttggtggtggtgatctgattttggataacgtggatttctctggctccaagattgctgttgccggtatcaatggcaataccatcctggctggtggctctgttgtcgacaactgggttcaaggtaacacctacaccccgtctaagactgtcaccaagcgcgccagcgagtctgagcctgaggtggtcaccgttattcagaccgttacggagactatcatggcctgtcccgcttcctacggtctttccagcaccagcttggtgagcagtgacgttcctgccccggcgaagactgcgtcacttgaatctgctcccgctccttcgcctgttcccggtgttagtaccagcagcgattctgatcgcattgctcagacttcctcgatttctgtctccaacagtgtcctttccattctcggatcctcttctgaggcctctgaagtctctgagcccacttccgcagctgctccttctagtgaggcccctgccacttctgtggtgtctgttggttcttcgccctctagtgtggtttctaccaagcaatctgctctgcctgtcgtctccactgctgttcctgtcacctccaatgttgtgcctgtcacctctattgctgcgtccgtcacctccactgctgcgtctgctaaaattactagcagcagctctgcagttagtcaggccacccagtctggtagtgacagcagcactgccacttgcggcgcctcgggcgccgttgcctccgcacgtacccagagcactctgaagacttcttctaagcccgctagccttctcaatggaggtgctatcttcgagcggtccaagcctctgtacgaagacgtcgccgcatcctctttcgtcagcgtcaagtcggctggtgccaagggtgatggaaccactgacgacactgcggccatccagaaggtgtttgacagctacaaagatggccaggtcatctactttgatcacggtgcctatgtcatcacctccaccgtcaagatccccaaggatatcaagattactggtgagatctggcccatgctcatggcatacggcgagaagtttgccgaccaagagaaccctgttcctgtcttccaggtcggccaaaagggtgacactggctctgtcgagatgagcgacctcatcatcaccaccaagggcgccgcccctggtgctatcctcatggagtggaacgttgctggctcttcccaaggctccgctggtatgtgggatgttcacttccgcattggtggtgccgctggtactgagctgcagagtgacacttgccccaagacccctaagcagaagaccacccctaataaggagtgcatggccgccttcatgctcctgcacatcaccaagacgggtagtgcctatctcgagaacacctggttctggactgccgatcacgagctcgacctcaaggatcacaaccagatcaatgtctacaccggtcgtggtgtgctcatcgagtcgcaaaaccccgtttggctgtggggtacctcttcagagcaccaccagctgtacaactaccaggtctcgagtgccaagaacgtcttcatgggtctcattcaatctgagactccgtactaccagtccaacccgactgcgctgacccccttcaccccgcaagactcctggaacgacccggacttctcgaactgcacgacaaactcctgccgcaagtcctggggtctgcgtgttctcggctcctcggacgtcttcatctacggcgccggtctctacagtttctttgagaactacgcccaatcctgtctcaactctgaggactgccaggagaacatggtcgaggtcgactgttcggacgtcaagctgtacggtctcagcaccaaagcctctgtcaacatgattacctcatctgacggcaaggctctggtccttgagaagcctaataagagcaactactgctccaccatcgctctctttgagcaatctgcttagattactcttctttcctttctatcattctttttctcattctgttctcgttcattgttgtaaacaataccatttaacttcttttgtacttcccccaacgttatatgagattcaatctccatcttctgctcctatatttctgtctagacacttctttctcttaaacttttctctgcgtcggatgcgcgctttgggggtcttttgctcgataccattgcattcggtttcattcatgggatcattactagacttttgtttcctttcggtatcacaatatacaatgccatgacatcttacgacctttagacctgtagcttgtttgtcatccggagtcagcgatgttaatttccaatattagcataagttcccctgcaatatacatagcgggtagatcataaaaaccccgtcggaacccgaagccatgtgggtctgatacgtctttcgtgcttatagtctcggagtccaggttgtgattttattagcttatttgcatgatatctctggtcacccacaaccccagggaaacacggcgtactccgttatcgagaaaaggaggtaaacggagctaagagaagtgacgcaaccaataagcactagttggtaattatccttggataccattcgccaggcttatatcttctagacctcattgaaccgaatgtggctgaatcatgacagggtttatcttcaggcctaaaaagaaaaagcaaaacctcgagacctcatggcgtgcaatacttttataatgtcgatgactccctcccaagagatacagatgcagatgcatgaccaaaaccagtcgaaaaagcccagtaaaccccaacgtctcccattccggacatcatgcgacccctgtgcagcttctaaggtgcgctgcaccaaagagaagcatggatgttcgcgctgtgtcctaaacggctctaaatgcgtgtatggacgctcgcgaagaaaggggaaaccgtctaccaagactataactgaacccgctcgtccacctgttcatcctccgtcttctcgagtccagatgtctccagctcctctagctcccttagcccctctagcacttccagccctttcggctctccctacccttcctgaccatcaaccatcctggcccatgggcccgaatcatcaccagcccaactataactacaactctacttggtaccggtctccaccatccccaacgaccaattatccaaccccgaccgaatgggagagaacatcaaataccttgcctccgagcttgactcatcaatcaccgggtgagaatgcagggatcctgcatttgcccaacccgggatatacatggcctagcatggtccggccgcgagaggtcccggaagacgaccaacacgagccttgcatcgcggtagcatgtcgaacgctctcctcgctgtacgaattcgttcaatccgactgtgtaagtggacacacagccaacgatacccaatctcgcaatatgctccaaccaccaacccgaagggaatcccccgcaaacgatgtcgtgtttcgcatgactcgatccgccacggagacggtttctcgattattgaactgcaccgggagatcctgcgcacgggatccttccaagctcctgcttctcgggtctgttcttttgaaagtcttaacttggtatgaagcactctatcaatctgagattggcgggccggacacttcgtcgttggataatcgcgaatatgcacgcttgcagccacaaccatatcatttgaatggcaatacaggtctctcgcggccgtttggaagtatgaaagaatcaatacttgctatcccattgaccaccccgttgggtatcgatatggttaatatctcccgcgccacggagacaaaaatgaaagcccaagtactgctctgggaggtgcagatcttatctcacgtgtgccaggctctcgagcatcgaatacaggctgctgagagcatacgcggtgagaataatctgtgcggacaggaaaatgcctatttatcgcggaaggtgggcgagctgcagcgcgctttgactgtggtgtgtacgccggtaccgtcactgggatagatgtcagatcgagaggatacatacatacagtatagaccaactcggtgcctgggattttaatattaatactgaataaattatggtacattctgttcttggtacaattctcgcgcactatctagagttctcaagaaattacaggattcatcatagacaaggctctatatatcgaaagtaacctattcgctctctccatcatcgcaagcagccttatcagagacacatgtcgagatattggcgccgggagctgaacgacacttgtcgaagatctcttgacaatcgccctcagcggagaccacgcgcaccgggtgtcgcaagtgtagctttgcgcgggagttgacctggccgtgtcgacacgcctcgcggtcggagtagcaggtggacatgttggcgtctggggcagtgacgcacttgttgtaggcgtcgtcgcaggtagaggtggtttgggttgcggtgatgctggttgccagggtgagggtgaggagggcttttaggtggaccattgtggaggtttgaggtttggattgtggtagtatgaagatgggtatacttgagatgatggaactgggtttgtggcgtgatgggtggcttttatagacagtagttgcgagcaatattgctttggttgggacaaggggctgacaaggggtactgtacattgaacttcagctattgaatgcatgatgagcgatggtatacactgtgtcgatcttctgaaccccacaactcgagcatgcggtcagttggatgagtggaaatagttcctgcactgctagggaaactcgatgtagagtgtgtatgttgatttcttgcgctgtagagagaatgtcgcaagagatgctgttgtagcttgtgatcggagagattaggcattgtagtgtgcagcaatcgagatcacattccaggtgcgtcagtgtgagatctataggactgatcaacatgatcgacacaagggaaatctggcgctagtctctacctgcaggttacctgatactagttctaataattcaatgtccggtggtttcttacaagaagcacaatgttgtactgagtactgatgatttaatattgcagttaatagctgttctagataatgacttgcttggtttcaccataaaggctactcatcctgaacaccacgtaaaggtgcaagtcttgttcaggtgccacacacaggacccgtgaagctgggttaggaaggagggggagggggnnnnnnnnnnnnnnnnnnnnnnnnnnnnnnnnnnnnnnnnnnnnnnnnnnnnnnnnnnnnnnnnnnnnnnnnnnnnnnnnnnnnnnnnnnnnnnnnnnnnnnnnnnnnnnnnnnnnnnnnnnnnnnnnnnnnnnnnnnnnnnnnnnnnnnnnnnnnnnnnnnnnnnnnnnnnnnnnnnnnnnnnnnnngggggggagagggggggagggagtaatcatatcaaagaaagaaggaacaacaaacacagagggctatctccgtgaaaaagttccaaaaagtgggttggagatgaagacaatgtgggcagcagctggacagtccgtatccacagaggtcagtcggagtacgtgactggtagagcattgttacctcctcggacatgcttcgtgccacaacctaacctgatatccacagagaccaaagtcaaaagaataagaccactccaggaacgaggtgtagtgcggacctagagtggtacgaagaaggaagaaaaaaggaagaggaagaggggggagggggttgggttttataccctgggggtggtgactcaaggcaatgggggaaactgcggttggtgacgatttttgaccaaaagggaaagcacccatgagataatcacatgtgcacatatcacatggttggagacttcaggctgtgttccatcatattctcacccaaatagctctacagccagtttttcctagtcgcttgggaactatcagtaactgctaatcgtcgacattctgacagtcaatgcttggtttattaaaactgttcatcgggctgtccctcaaagagaccattggacactgaccaatgccgacgagggcccaaagaagatatggaaaggcactatattctacagttactgtatggtttcccggggaactttattcattgcgcaataaaacaagaaacagcctaatcgtactcttccgaatagaataacacaggacctgaagaacttgaagataattgaaggagggtggacttcgtgttaaagctgtccaaattgtcaagcaaactttttagagctcctttttcacggaatgctcaggcttatgggtggtctcgtagtcaacatgcacataggcacgctcaacgtcgggaagcgactccagcttaatctggagctcttcagcaacgtcgtgggtagcacgtagggatgcctccgcgtccatgacgacatccacctcgaccagcaggcgagggccagaggtgtatgcacggacggtgtcgatggcagtgatgacaggagagtgggtcatggctgaaagagatgttagtgaatgctttatcaagagctagaagaaccgaaagggaataaacataccgatatacgtgatgagttgctgcatcttggtgtcggcagtaacgccgacgagcaactggaactcgccataggcggagtgcagccacagcccactgaccagcacggacagaatgatagcacccatgggatcgatccaccaacgcagcttactaccaccgacggaagtcagaataccgaacccgttgatgaagagatcgttgcggtgatcctcccacagaatacggatctgggagacctggttgcgcagggcccagcagtaaaagaagagggctagtttggtggcaaaggcgacagcgacggcaatgatggagggcaggtggaaagactgggtttcttcctcggagcccgctgccagttcgcgaatagagaaggcgatgatgatgaaagagaccgaggtcataaggaagcagaagcagatgttgcccgcggtttcaatgcgggcctttccagcggggaacttccgtggatcaacgcgattgacggccttgttgcacagcagaagggtcatgttggacatggggtcgaagacggcgtcggccattgtggtaaacagagagagcgatccggacgaaacggcaccgtacacctgaatgaccgagagaatgatgttcgcggcaaaactaccgtagacagcgatccggtacttgagacggttgtcgacgctcagctcgcgggcagcacgtcggtgctcctcgacgggtttcagcatgcgctcgatgttttcattttgggactcgtaaaacccctgtagcttcttggtgacgaaggcttgctttccaagacgggcagtgtctcccactatgtctcccactctccggcctttgttcgcagtggtggaatcccgtttccgcgaggtattggccttcatctgtcggatctcatcctcggtctttagcttcgaggccaattggaacggatcgctttcagaggtgtaacgtggcggcaggctttcttcatcactggaactaccagttcggtgttggtgaatggtggtgagctcatgctcaagggcggtggtggtcccttcgttgatggctagtggaggcattctgtcactccggtgtgacggtgaaccgctatgagtatgatgcaagtgttggaaggcatgaggatggtttgagagactgtggcgtagatgttcctccatgatgaatgaattgaatgggatgaattggtgaataggacttgagatgaaagaaactcttcataccagggaaataattccaagattcccctgtggctgagcttatctgatgccccaccatagcttcttggcacctcgctgtcggggtggatgtatcacggtcgctggggtcggcaccccatcaccagaattcctaattgtgacccaataaacacccttttgaatactctagaattttattgctcataaaatggcagccgtgaaaaaaaatcggacggaaatccgagctccacgagttcagacgctaaatccataatgtttttgatcacgtgataaatcacgtggtcaaactccccagcctcccccttcttccatcctctgggcatctcttcaccttctccaccttctcctccaccaaccatcatcctcatcaccatcatcaccatcatcatcatcccgtaaaggaagtactgttctttgccgtccttgtcgccagtcctgccattcctgtgttctcataggactctccgatttcacttgttgacttcggattgggcatgtgctcgtggccaggccgcaaaagctttaccactttgctcttctcttcttcttcttttcatcattcattctacatttcacgcgagtcagggctgctcaatactatttgaaagcccgggtgggagggtttctcgattcttcgagggtcttcctgtttaatccagcgaatatcgcacaatgaccaccagatcgtcaaacccgctctgggtcctgcagaagacagtccttgtttacacacccgatttcaagacttgttgttctgctcgccttcgtattgcccacgataaaaccgccaaccgaggatctatctcccttcggtttacggcagagcttgctaacttgagcggcagatcacaggtgctgacgttgaatatcccaccagaaatagtcgaaaaatgtgaattagcccggataagcaacgtcggcctctgttcatctgatttgctccccaagctcccggcgcccgtgaccaacctttcggccgtctcaacactgagtctgatactcaataagactggtcgttttctttgtccatctggggtagagtctttaagtccagccaatcaagaagacttagatcttgacgcatttgcgaagatctgtcaatctacatctcttcgtctacacttttccaaacgacaattcgtggaaaaagaacttaatcagctagaatttttctcgggtgctctccggagtcttcaggcagagcattttgactacgctcggcatggcgtggtgcagaaagattggcccttcagtttgttgctcgatccacccccgtattctgaggagcgggtctccgaccgggtgaagcaggtggatccacccctgtattctgagcagtctgagcaggcggttggaaaacggcccagaggtatcttgtcacttcttatcgtctgtaatttgtcattcaatggctcattaatagtatctagacctatggtcaatgtcacctgacgatgaaagacgaaaaagactgctccttacatcccctgaaccactaggctctcccacggaagtcaatacaccgagtactacacactccccgtcggcctcaatccgccccacgtactttacgcatacttcctcccctggccgcacaaagcgtaacagacttgcgcgccttgaagatgaacttcgtggtgcttccgatgactggatccgccaacttttaatccgattaggacgggaacatctgctggccacaccacaagatgtagacagtgaccggccatccgagtctgagaaagttagatttgccaatgttgggatgatggagagccaccttaaacaatatgtcgatgaaatgattgagcgccgtctcaaatcacatattgtcgacgagattgtcgatagagccgtgagcgagtgtcgtgaacagatcttcgacgaatgcaaaatgcatgaagccggactgggtgaaaaggtcgacgacgctaactccgagatacacaatacggccaatgagtgtatgaaggaaatagaagcacaagcgcaaaagcacatgggcgacatagaagaacacgcgcaacagtacatgaatgatatcgaggatcagggagtcgagatcgaaatgtccgcggagaaaaatgccgccaagctcaagcgctggttcaattctgcccagtccctacttgatagcaagtccgagccgggcacgaaggctagacgcatttccatttgatttggtacttatctttcttaggatcgtcgtcgtgcacttagattttttattagtctggaaaggtaggtgatgaacgtatttctaaacgagcaggcctgccaaatttggtcctgggtgcttaattactatatttacgctaagatgcgggggtcagatgagttgattcttacggagtaatgcttaacagaattatatatcgggcacaacacaacgcagtcactatcgcggtccccgaccccttctacacatacccaccgaccacatttggggtgtaaaaatgcaatgtgcagtacaagtggctagaaattggtgcgggggacaatttttgtatgggggtgggccgtgcacgaccatttcaccatacaaagtgggccactttctccaaaagctgagtgacatttcgacaatcggctcagcgaactggcgaatcctgaaatttaaagctgcagccctgtcaacgcagctttctgtattagacacacgcgacttgaattttgccatgatcaactctcaagacaggttctagtccgaaggccagaactactgcggcaacgaaggtcgatatgatgttactggtgtcgcctttacactctacgagctcatcacgaacgatacttccttctcggatatcccctattgggatcgacatatagacatggtgcaaagtattgaatggatcgtcaatcgcgaacttgattcttgacgtatcgaagtttcgcaacttcttgagcgaatgggtagcaacgcgaagatccgacggggatatggaaaggtatctcaaagcaccacagcgatttatatggccggacctaccaacatcgcccgaccacgatgtaccattcgagataggcacaacctagaatggaaagccacactggatgactggccaccggtctagattcaccgcaatggagatggggcaatattgctttcgctgggagaggccaccacggagccgctcgtcactcgaggctggaaatagtgtatagtcgatcagaatactggactgcgaaatgaagatactttcaaatgattggcttcaatcttgtgtactcattacctagtcccgtggctgtcaaagagtggaaccacacggtaaaatgatcccatagttcataaaatattctggcatcctgacattatgacttcaaagattctatgctagatttgatagtgtgcgccgacttttccagctcccgactttcttcttcagacagcttgatgtcgataacatggtgggccccggttcggtttacctttttcggcatgctcaacgcgatttcactcacgcctgcaaaggttccagccgttgacacagtcataagcgtgttctcattcctgagtatagtctccacgatcctcaccaagccagcagagataccatagtccgtcatgcctttcagcttgattatctcataagcagcattcctggtgtcttggaatgattgtttcatgatatcctttgcatcctgaccagcctgctgggaaaactccgccaacgggatacctgatatattggcccgcgaccacactggcaattcgctatcaccatgctccccaacaacgtctgcatgaatgttactcgggtcaacatccaatcgtcggcctagagtgtcgcgcaagcgtgcggtgtccagaacggtaccggacccgatcacgcggctcggcgggaacccagacaatttccagctcaggaaggtcaagacatcgactgggttactcgctataagaaggatggtggacggggccatttgcgtgacttttggaacaatgtcctcgatgattttggcattgatccgtaagagatccaaccgcgactgtccgggcttctggtttgcgccagctgtgattatgacaatcgctgcctcagagcagtcttcaagatcaccaagtgtgatcttggtctgatgtgagaagggagctgcatggttcaagtccattacttctccttcggccttgcgtcgattaaggtcgatcaggacgatttcggctgcgagaccactcagaagaagagcgtaagcggtagaagccccgacattgcctgcgccgacgatggcgattttgaccggcttttgtaatcagtatgggttcaatgcatttatcaagtgaggcttcaaaactaacatggagatcgatggcaattgtaggcttctttgaagaatttcgggctgaattggattgcattgtgtgtagagctttgttttgattgcttgctgattgctttctgatttgactattagatatgatatcaatcgcgactatttatagtcaaacctcctccgtagatcgaacttgcccctgaagtgaaacgagtcaacacgtcacataattgaagctctagaatccatagagcttctcaattgtgtcatgtacagacgcatgacgaaacaaatatttttgccacggcatgatcttgctcattgactttgttttcgtcgatcaaaatggctgatatctatggagtttactcggtatatcctgttccgtctcggccgacgtggctgaagagatccaaggtagatgaactgaacttgcaattacacagacggttataaaaaagtcgatacgcatccaagaaagatgaagcagtctcatgagaactcccttcgaaacctcaattgaacattacaaaagccgttaaaatgagaatcgccgtgttcagtgcccagccctatgacaaggcatcgctggatcagtctaaccaggcattcaagcatgagatcacctatcacgaggcaggtctaagcgagaagactgctcttctggcctcgggcttcccagccatctgcgtgttcgtcaacgaccagatcaacgccaatgtgattcacaagctggcggagcatggcactcggttgatagccctccgatgcgcgggattcaacaacgtggatctcgctgctgccaaaaaggcggggatcacggtggtgcgcgtccctgcatattcacccaatgcagtggcggaatacacactcgggctggttctttgtctagaacggaaaatccacaaagcctggctacgcgttcgggaggaaaactttgcactcaatggccttctcggtacagacctctacggtcggacgatcggaattgttggtgctggtcggatcggctcgttggtcgctcgatctttccgcgccggccttggttgtgaagttcttgcgtgcgatatcgttcagaatcctgagctggtttccatcggcgtcaagtacgtgagcaaggaagagctacttcgacaagctgatgtcatttgtctacattgtcctttgacgccagacactcggcatctgcttaactcggatactcttcggatcaccaagccaggtgtcaccatagtcaataccggccgcggggcattgattgattttgtcgctctgcttgacggactggaaagtgggcatgtcgggggtgcagcgctggacgtttatgaatacgaaaagccgctgttcttccgcgatttatctgagcagatagtttcagaccacaccttccggcggctgatcaccctccccaatgttatcgttacaggtcatcaggcgttcttttcccgtcaagctcttgagtcgatcgccaacacaacgctttcaagcgttggtcaattcgaaaagaacggtcaagtggagaaaagcgtgacgctctgagttagttcagtgtgaacttgacgcggactagattcagccctgtcatttacttgtctatttacttcgtggatctttatgaactaaaagttgtttcataatatacaagatcaaatccaaaaaaatatcgtctacccagataaatgcctccagatgctctagcacagtttaaaagccataatacaacaaacaaatatggatcttaaacatttccagtcccatcaaactaataccaaaataccttggagaatgaagccgtagatctctcataggaggttgtacatcgaaaatcgccacatagctcactatccttggaacgtcttcggccgaatcagacgttttcggtgctgcatcacaccacgtgtagacgtcaaagaaactttataccaatgagcttcagcttggaactgcggttgacggcggtgctggagaggttcacttacatcggtggctagctatatccctcagccttaccacgtcatagacaactataagcggaagcacaatgtgtatagtcaggctcttaatcatgcgtgtcagagcatatgacatgtatgattcacgattgttctagatcgagataatagggagcctaccacgtcatagacaactataagcggaagcacaatgtgtatagtcaggctcttaatcatgcgtgtcagagcatatgacatgtatgattcacgattgttctagatcgagataatagggagcctaccacgtcatagacaactataagcggaagcacaatgtgtatagtcaggctcttaatcatgcgtgtcagagcatatgacatgtatgattcacgattgttctagatcgagataatagggagctctagaacattgtacttggcagcttgtgccgcgaaacagatttaaatactgtgccttgaacgcgggcacaattctattatcaagtcaatccatattatttttcaattattttctacaatatcacgaacctgttcaccataaatcaccatgactacagtcggaagctatctagccacccgactggctcagattggtatcgagaggcacttcgtagtgccgggtgactataacttgatcctgttggacaaactgcaacaggaacccagtctaaacgagatcaactgcacaaatgaattgaactgctccatggccgctgaaggctacgcacgagccaagggcgtcgctgcatgtgtcgtcacctacagcgtcggtgctttctcagctttcaacggcattgggagtgcctatggtgaaaacctccctgtcattctcatcagtggttcacccaacaccaatgattcaggtgacttcaacctacttcaccacacgctcgggactcatgactttgagtatcagttgcaaatggcgaaaaagatcacggtcgctgcggtttcaattcgtcgcgccttggatgcgccgaaactgatcgactttaccatccgcaaagcactccgtactaagaaacctgtatacatcgagattcctacaaatttgtccaaccaaccgtgtgcgcccccgggaccaccgtcggtcatcttggagcctctccatagtgaccctgccgttctgaaggaggctgttcacaagacagccacctttttgtcacaaaaaagtaagattacgatcttggttggtccaaaagtcaggtctgccaaagccgagggcgctctccgagactttgcggaagcattgggctgcgcggtggcagtgatgcctagtgccaagtcattctttccggagaatcatccccagttcgctggagtttactggggtctcgccagcacgctgggtgctgagtccatcgtggactggtccgacgtgatcgtctgcgttggaacagtctttaccgactatagcactgtcggctggacgagcgagccgaccgattccatacgcgtgacggccgacgttgaccaggttcagctcccgggagcagaatactctcgcgtctacttgaaagagtttctgtctggactgtcacatctggtgaagaaagacccggcaacaatgctggaatataaacggttgagcccagccgagccaagtctgactgccagtcatacgaatgaaaagctcacacgaaaggagatgtgtctgcagatccagaatatcgtcacctcgaagacaaccctctttgctgataccggcgatgcttggttcgatgctattaaaatgcggcttcccgaaggaaccagattggaggttgagatgcaatggggtcacattggatggtccatccccgcatcccttggctatgccgttgggcaccccgataggcaagtgatcacgctggtcggggatgggtcattccaaatgacagcgcaggaagtatcgcaactgaccagactgcgcattcccgttactatattcctcatcaacaacattggatacaccattgaggtcgagattcatgatgggatttacaacaacatcaagaactgggactatgccgcgttcgtagagtcgttcaatgcgaaagatgggcatggccgcggtttccgcgccaccactacaggagagcttcgtgcggctatcgaagcagcgaaaaagaaccgacacggaccgactctaattgagtgtgccatcgaccgtgacgactgcagcaaggagttgattagctggggccatttcgtggctgcagctaatggtcgtgctcccaaggcataggaatttttgatgcgttatttgtcataatttgtattcgtcattaatatggctgagtacacgaagtatactttcctaatctggcagaaaatgaatgttaccacgtcttgtcttctagagctactccgtatggcttccttccttggtaagtgtttctgctgcgctattccctttttagaaagtgacatcatggcggtgtggactcgacttgaacgcgaacctcgtaaaccaacccccttcttccgcattgcatcagaacctaccctgaaaatggaagagcaaattcgacagatccgtgggcatatcaagagtcagattccagacaccatcaacgacttcctcgaaacggttggaacaacaacaatacgaatacttggcgacactcgacattggagattagccgagttccatacgccgatttgcgtcaacggtcgagaattcggttcgtgtaagccagccgaacgctgaaacttgtttcctcgccgtgaacatatacccacagaagcactcttattcgtgctcttattcgtgctcgatgtcaacaatgtcgactatatctatgagactgcccacaatggcatgaccacaataccagtctatgatcttcgcttgtcgaagagtagaatcagcaattctcagagaaggaacgctagaggctaatattgctaatacctagcaataatgcacaatgggcacgggcatgacccttgcctttggttgacgattacaacgacgtttgtcctccgatacaaaacccccgcaaccttttgtctcgatgacttgaccaagatgctcctgacccagaggaaagagtattccagcactattcaagcactattcaagcttagtgggtcttctcgatatattcacatgggggtgttatgaggcaagatagtggtgctgtgtcacccgagatctgacctcgaagacagattctaggaagatttttatttaagaagcatcagcttggcgtgagaaaaagctttgcaaacctctttggtctggtatgatgacacttatgctttaaatcaatttccatcgcaaactgttctttgtggagaaatcgattatcaaagaagcactgagtacggtacagtaggtcgttgagtgcatttggtcttggtcgaaagcccaaagggtcaactcacgtgcagcagcaccagctataaatgacaatcaatctcctttcatctctctcccactactcactttctccatctaccaaacattattcccaaccacagctctgttctcagacagctcttactcaatccaccttcaagtttgctattatcgacatggctaaagagccaaccacccccaaggccaaggcgaccaaaccggtcaagacaggaggaattgcaaagcgaactccggtcaaagcctctcctgccaaagcctcccctgccaggatctcgctcgctatcattgataaggacgtgatcttcttgtggaaatgtatcaagactagcagcatgaaggcaagtgtctcagatatcttgatacgtctgattaaacacactatagcatgtcaatactgactaggttgtcttacagattgactggaatgctgtcgccaaagagacgggcaagtcgacttcaaccttgcagaagcagttttcgcgacttaaccagaagcttgagaagaatgttaaagttgccgcccccgatgcttcctccgacaaagatgccaatgaggatgttatggttggcgcatctaaagattctgactagatggatcgtgatttcggcggcaatgcagaggtgacgcgacgagggaagacaggctcggtataggagttttgtgttcgtggtcattttcctcgtgattttcactaccgcctcatttgcttttcttcaatttcttattctctttcttgggtcaacatgtgcccctcggtatttttacttgtgacggcagcatcttggcgaagatgactgtgacggtctgagagccttcttaatccaatgaactttataaatttattttaccctaaatttcatagagaacactagtaaatgttggctggtaaacaaggtcttaagacattcaaagtgacattgaagttgttgcagtataagagccatccaaggtacccatgaatcggacaatccatgtccaactacgtcctccgatgtccaagtatgtccaagtataagccctgacacgtccaacttgaacaatccagccataagatgacctcattcctgcatattcgtccgagcccctcacctgggcatttatttaccccgccccttccagctcaacaatctacatacttcccaccttaccccgaatcatctaatccatctaattcatcatgtccaacccctatttcgatatcgaatacacctcgcccaagggccagggtaagtacacccccctatctcatcccagcgacgctaacacgcgtactagtggagaattggggccgaattgagttcaaactttatgacgacgtcgtccccaagaccgcgaccaacttccgcgccctcgcgacaggcgaaaagggcttcggctatgcgggctctgctttccaccgcgtgattgccgggttcatggcgcagggtggtgactttactcgtggaaatgtcagtcacggtatctccagggaaatctgagctccagctaatcttcactttcttctcagggaacgggcggcaagtctatctacggcgagaagtttgcggatgagaacttccagaccaagcatactaagggtggattgctctccatggcaaatgcgggacctaataccaatggttctcagttcttcatcactgtaagttggaaatgaaattgatgggagatgtcttgttctgactggattagtttgtgaaaactcctcacttggatggtaagcacgttgtcttcggagaggttgtctctggtcaggatattctcgagaagatggagagcaagagcttggatcggtctggaaagactgatggtaccattaagattgctgcttcgggaacagtctaagctattatttggaatgtgctctcttctatctacacttactgggtagtaaggcggatgtgaactcgtccatcgtctcatcgatctatgcatgccatatttttttcaagacttccatcaagttagatagaatgaatactaaaattcccggcaaataccattgccaaaaccatgcaacatcagaaagaatcagtaataatactatacacacaagtataaatcacttcacagcaaccaaaaacaaccgcggatacttcaacaacaccctcccatcaaacgaaacgggataagcagcccgcaagcgcctcaaataatccgccaaaaacgcctcctcctccccatccaccaacggctccaaaaacggcctcaaccccgtccccttaacccactcaataatcgcctcatggctctccagcgaatgataataactcgtctcaaaaacatcaacccgactacaaaccggcttcagcagatcatacagctcctgcggcgactgaaacccatctctctgcaccccagccagtttctccttccacggaccctcagcagcagtctcacgcatgagcagatgcgacggctcgttcagattatgcggtacctggagcgcgaaaaccgcgccctcttgctgcggctgtagcagccgtttaatgaccgcgatgcggtcatccgctttcagccagtggaacaccgcgttcgagaaaaagaggtcgactggcgtggctgggtcgggcgtgtacgtggacaggtctgcgatttggaagtcatggtctgggaggactttctttgcgcgcttgatcatgtccggtgatgagtctagccctgttattgttgctgatgggtattgggttgctagtactgttgttgagttgcctgggccgcagcctaggtcgattattctccttggggctgttaggggcacgtgcgataggagatcgcgggcgggctgggtgcgctcgttttcgaatttgaggtattggtttgcgctccagtctttggtttgttgggtcattgttgtggtgaagtgtctgtagactggtcttgggattgggattcttgtagagtgggtgagtaatctcgttgctgtgggattaaggcgacaaggcattgttttgatggtgttaaatactagaagatgtttggctgtatgggcaatatttgtctttatattgatatctcgtgtttaatggggtgaatcaggaagtggcaatgtcggatgttcggtgatcgctccgatatcgctatgaacagcgttgcattaaaatccagaacgatgaaggaagctggtaaatccgacatccaattaccgatatatctagctactagctaacatatgaggtacagatagataagatgaacatgatgtgcgacactacgctgcccgctttttagtggaccgaggttcgcgccttccgcatttaattacccaccaagttgcccaacaaggactcaatccaggataggacatctgcagcactaccagtggggatagatacggccgaggtagtagcggaggcatcagcgctggtagtagggacttgcgccgcagcagaagtagtcgattgacggacagtggtggcgaaagtagtaggctgggccgcaaccgtggtggtggaagtagtaggctgagcagcaactgtgatggagggcgttgtagactgaacagcggccgtggtaggggttttaacaacggcggcaactgtggtggaggacgttgtaggctgaacagcggccgtggtaggggtttcaacaacagcagcagttggggtggtagtggcggcaaccaccgtagagctggaggtcgacgagatcgacgaggttgatgaggtggacgaggtggacgcaaccgccgagctaccagatccaccgagagtgaagtcgatacacgactcgtaggtctggtcgattgattctgcgtaccagtaccactgcaacacacagtcaccggcggtggcacactggcttccaagatcgtcggggatagtgacgctgaagctggtctcgttggcagtgacgccggtggctacggacgcatagacatcccaggagattaggggactgccaatgacagtgttggaagaagtctggacgacagagacattggccacaccggtgtgcggggcgcgaatatcaacagtgaaggcgacttcctctcctgccgtgtacgactggatgttggcctggttgtcggcgaacttgtagcccttgcacagccagatgtcacactcggcggcgttgtagtcggtctgggtggcggcaacttgtagctcgccttggatgttgccgtacttgtcggactcctggttggacagaacttgctgaccacacgcggctcccattgcagtaccgggctcgcgggctgccgggctggtgacgaagccatgggcgttgaccaaggagatgatactggcgaaagccagggcgggggtgaaagacttcatgtttagtgaattgggatgtcgggaagtgaatgaaaataatcggtaaaccggaccgatgaatgaatgtatacttgatgaacgagagtctgcacggtctcaaaccggagaaaatgaatgtgaatgtgaatggaattcaaaaaagactgaccagcatgctgaactggtcttgccacgctgctatgtcgcttcttatatagtggacatattcaaaaggaggtctacctgagctgcgacattaatcaactagaaacagtagcttaccacttaccagaggcatcatgaacagcgattaggcctggatccatgatgtatcatactgaaacacatcggatatactcaagggacagcgctcccccaccggaagggactggtcagactggcggcaagcacagggcaatatggcctcgggttcgggtgtatattgaacccgactggatgatcatctagagacgagatgttcctcaggctagggtttccaagcctggctccacgcgccgaacagggatgcgccgggtttcacgttgatggagacctcagggctgccaatggcgggtggtgacaggtgagacatggagttttatggatgcttgaagttgattaaagacgtggagatggaagaataaacatgacttggcagttctcttcggacgattttccaattccattccagaattctcccgggtagtccacttggtgctttggaaatcgaactagatccgatgaaactaaataggaagttcatgagctgtcaaggatttcacagtcaaagatcatctgatatttgctgcccaagcctttagcattggacattctcgcatatgcaataccttgtacgcaatgcctccgagtgattagcctcagctaatcccttacaggagacggagtattgtgaagtttgaagttattagcgtcggcttgccgaaattccaccaatcatgacaccggagtattttatagagctgattggcattttcccctacctaagtggctcttggatactggtctcttactctgtgcgatatgcttcaatggaaaatgatagacaatcaaacaacattcactatatactcccaccacccgtgaccgagccatccttcctcgtgtcttgtgtatggcaacagtgctgaagaaacatcagtccacctcagcttctagcgattcaatgaaagatcaaagacaatcttgcccttcgcatgcccctcatccattctcttgaatgcctcttcatactgctcaaaaggccagacgctatccaccaatccccgacacagccccttctcaagcaacttcgaaacctcctctaactgtctcctcacaggctgcatgataaagaacacatctttcacaccttcacctttaaaaccctctggacagacctgcagaggtggctgatagatactcagcacaacaccatcatccttaacagtccaccacgcatcctgaagagccttccccccgatacaatcaacaacaacatccaccttattagaaggtaactgcgtagcccactccttcacatccacaacttgataatcaagcacctccttcgcaccaagagacttcacaaattccacattccgagggccacatgtcccaaccacctccgcaccaagtagcgtggccaactgcacgagccaaatgcccacaccaccagaagcagcagtgacaagaattctctttccagaccaggcaactttagcagcctcaaaactcatctctccctcatttgcaccggtaccaagagcatgaacaaaaagaatctgccaagccgtctgcgcagagacaggaactgcagcagcctggacccagcttaggcccgtaggcttatgagccagctcatccgtaacggcgatggaatactcgcgcgcatttcctggccggctatagtttgtgcgtgcgtacacttcatcaccgggctggaagggcgagtcgtccggtcctgagatgacgattcccgccatgtctggacatgggattagagtgcgctctgttggtggagggaagttctttggccagaggagctcgccggcgcaagggctgcaggcttttatttggatgaggtgctctccctgtgcgtggtttggagttgggaggggtgtatttgttatggtgagggttttagaggcggcggttttttggatgatgctgaacattttggagggaagggagtctgacatgtttggaattcgaaacgttgttattcaatgaggaatgtgctggtggtgtttcgttcttgggctatatagttcaaatgttgaggcgtcatccggccggatatcccgcataggctaattgatagcctatcttggtacttggagagtatatcctaatgttgcactaaattggaactcaactaacctaaattcccgtatttctcgtatcggaaactatagctacgaatcataaatgcccgtcatattccctctcttcgacaaaattgtaaaatactacaatataggggggagatggaagatagacaacatcaactatagagcggtagatatccttttgacgattttagtgaatatgtgtgatattattcccgtttgagacaacgaggtgggctcactaggccaagcggaattctcagcaggatttccgtgaagaatacacactttacattgactcttcctattggtagacaagagtacttttgcaattccgcatgcgagtacccaggcgacatccaatccgagggctcatatcagtcggaagagatttccaccccacaatgccacacatcccagcccacagttcaagcctatggcagcggaggtttcgacgattgcattgcctaatctggcctgtgacatgcacgagcgggatgccatgtgctcctgccatgtggtccaatgcttttcgatccagtagctccgtcgagcaggttccggattctcgctctcgactttgatcgtctactctgctttttctctgaaaacactctacaatggatagaatacatactgagcccgaggatgatatcgccgtggtatgtatactgcttatctctttgatttatgtttctgacaatgttaggatcccacgacccatatcacgaccgtttacggcgatgactggcaatcgtgagtcttatctctgtgcctatatggagatctctcacacaatccagggaaaccacttcgatcggctcctcgctttatcgcgggttagaggagaatggccggcgatatcaaacattgagcaacaaggaatatctgtacgcattggcttccgaatcgaggtattgcctgcttacttcctgccaggattccatcggatgagaagcagttcgattgttacgaagctgggtatgtggaattctcttacatatggtctttgttcaaatggtaactgattattgcagccacttggtagccctcgtcatggactcagaccaagagaacccgctcttccggtcgcctgttaaagaccccaaaaacatcctcgaccttggaacaggtctgggtaactgggccatgtatgtggacctttcattttcataaaggatcactactcaccctcttctagcgatgtagccgacatgttcccaacaagtaagtccggagccccggtccaattcaccatatcaacatactaaccaaaaccccagccactgtccgcggagtcgacctcttcccaccaccagtaacatggatgccaccaaactgcatcctagaagtcgacaacatcgccgaagaatggacctggaacgaacctcaagacctaattcacatgcgcatcatgatcggatccttcagcgacgcagaatggaaacgcgtctacaagcaatgctacgagtaagcgcactttcatccccatccccagctcccataactaacccgaccccaccagcaacatcaccccaggcggctggatcgagcaactagaagcaagcccctacatcgaatgcgacgacgacagcctaccagcagacagcgtcctccgcagctggggcccatcgctatccgcatgcggcaagcgggccggtcgcccgctagaaacaatcgatacaatgcaagacgctctccgcgagactgggttcgtggatatccgtcagaaagaatacaagtggcccattggcccctgggcccgagaccagaaatacaaagaggctggcacggtcaactaccagcattggatgtccggtatggagggctgggctatgtggttgctgtgtaaattcggggcgccgcagccttggtcgcaggaggaggttattgtttatgttgcgaagctgagggcggagcttaagaatcctcgctatcatatttatcagcgcgcgtatgttttcccttccttgcttcttgtgggtgtgggctgatatttatacaggcgacgtgtgtgggcgaggaagcctttacctgagcagggagctcaggcggagactagtgagagtgttactatcaagactgagcagtgagaggatatttcgttgttggggtaagtgaactaggttgtaggatgacatgtctgatatggcgagttgattggaatggctggacgcagccagccttggattggcgtcttgtgctttttggactctttgtaggtgctgtctatgacttcctaccaatgcattcgatcttttgcacatatatatgatagagggacaatgccctgcacaacactagaggacggagggtaagactcgcatgtatttacctcaaaggtgtgtacctagagtatgaaacgacggcgcacgctcctcttctgtgggtcaaacatactgctgaaggtgttcgcagtaaaagctaatgaatatgtgtagtaacaatgtgcgaggtatcatgggtaaagagggaaagagaactgaaagagaaaaaaaaaaccaaaggctatgcgcttgtaaaaatagacaaaaccacaaccagagttgagcgtaacaaaaagaaaaagactgggcgatgacaaaagagagagagagagacgtgctaccggcgatcactctggacctgcgaatcaaaatgcacacgattcctctcctccgattcattcgtggcatagtcatccgcgaatgggttccgcacctggaaatcctcaggcttgtattcatatcggctattagtcgtagatcccccgacaggattggaattgagtgaatgggaagcaagtggccgaccaccagtcatagtcggagaaggcagctgtgccggggattcggagctgcgcgttgaaatgccagctggcgccacggggggaggagagaaattcgtaactcctggcgcgacaacctgcgacgtcggtgaagggctattcaaattggacgagctgggcgacgaagatcctctgatcttgcgcgccttcagcatggcacgctgctgttgcgacagcgccacggagatctcttcgtttgtctcaataagcgtcaacaaggtgtcctcgtccggagccgggttggtcgcgtggatatatccttgaacaacacgcgaaccggttgtgcagcggtcaacaaactccttgatgagatcgttgtcttccagctctatcggcggcgtggactgaacgaattgcgtgagcagcttggccgaattgcgcgcctcctcgatgcgggctgctagttccaccggcgtggggagggtatttgtcggcgcgcgggacaggccgtatggctgttggtgagggcgagacctaggcgggactcgcggtgggacgacggaattccttgggaaacggtcgatctggctaggttagtcttggacggcgggcacgcaaggtgactatgatgtactcaccagaccgtgagaggctttcgtcttctccttcgcccacatctgaagcagcagtttgagatcttcgtcccatgcacgttcttgctcgaggctatccagatactggcggagatagctctgcacgttccagtcgcgtcctgtccgcagcagctccttaacggttgtcacgaatttggcatcgaagttgcgtgtgaaggtgtgccccgggttgtcggccaggatgcgcatgagcatgatcgcattgtactgggtgtggttcggggtaccggcggggtcggtgagatacttgcgaatgcgcaaagccgcttccttagcggcattggggctcgactcggcagtttcgacgatttgagggaggtaaacgaattcagttccttgctggagtgtgcgaatcggttgtcagtctcgaaaagggggtgtgttatcatctccgaggcacgtaccgcgtcgtgcgaagatccatccgcattcacattctgatccgattcgcagaaggcagtctggagatgtcagtgtgccttgttcaatctctcgagactaagcacaaaccaatgcttgcaggacaacggcttctggtgagtcttcgctgtattcgacactgtcgctggagcctattttcaggtacaaatcagtaatttgcggggagacgtggagaggagacactcacttgagcgcctgctcagagatcccaggaagcgcttcatggtgatcgcacagtcgcttgtttttggggagggtttttgaaagggaagaaagggatcaaattgctaaagaataatcctagtaggggcccaactgcttcgaactagtatggaactagcaataggtgccctcgctagttgatcaataaaaccgagcagtgagatatatataagtcaatgtccccagcgatcaacgctaccttccacgcacgcatccagataatctgcattgccaagctgagtgccatcaggctccaggcaattaatctcacctgcccagggatccatgatgttttgaccctggtgactcagccacgaacgaaggtaggtagacggtacattgtttcgatacgcattggccatatctttagaagtaccaagtacttagtatcgtatctactctgcttcaacagcatctgccatctctcccagtgtcttaaaccgccaatcaaagatcggatccgccgaattccccatcaaagccccaggccgctcaatccaaaccgacttaatgccgaccttcctcgcaggttgatgatcatggaactggctctgcgccgtctgcagaacctgtccaggctcaaccccaaactcacgctgcacagcactcaacataaactcaaagttccgtggatccggcttgtaactgccaatatcctgcgcggtaaggatcatatcaaacggtacaccctgcaagctgccggcattggacttggcgaatgaagcccggtccacgttcgacagcaccaccagcttgtagtgctttgacagtcggcggagggcgtcgacggtgtctgggaaggccggccaggttccgacggagttgccgaattggcgactttcctcgtccgttggcgggttgaggcctaggcgcgcggcgagggtggggtggattgctgctagcaggtctgagtatggaaggtccggggttgcggtttgttgggtgctctcaagctggtggtaggttgttagaaggtgttcacgggtgaattgggtgctgcttttcgagaggattggtgccaatgcatcgatgatgccgctttcccagtcgattagagtgccgtagacgtcgaagcagaggaggcggtagtctgataggctggtcattttgggttgatcgtgatatatatagggagatggagtagattggatgagggaatctcgaagtgtattctgtttggactacagagtacttatacccccgcatttagatccctgcttatagattaaggaccttggcatgttcctttcccagataaggattgccggggactgaaagtggtataggtaggatttcctcaagattccatatctaccaataaaatccttcaagtgcatatagaggtgaacccgtaattccaaacaccgagatatccactcatcgttacgatagatcaatagatcagataatgcatataaaacagaaaaaataagatcacattatatgaccgaaagatcgaaacctcgacagaggtgtgcagctaaacaagacagaaatggaacactctctatcaaagaaaaatcactcgatagagtcacggagaaagaaccacgtttgtatcatgattggatcgggaagtacagaatcctatttccatcatcctgggccatatcgtttaaactttttattgggttctcctccgagtgttggcatgaccttaaaatcttgtatgatccggtatcgagtccgttccaacatacacagctgatgcacagaactccgatccttcccgtccaccgcaaaaatcttttcacattgcgtaaccacacgtcccctcacaccttcttatggcgatccgtttatgcctcgatgagagcacggcggatctgggtgccacgctggcgggaagagaggcggacctgcttgtcggtgctggccttcttgacctcctcggcagcctcggtgaggatgagctcgatgtggcaggggttggtcatgtaggggttgatctggaaagaaaaggtcagcatttggataccgactcaaccgtacatattaataaaacgtacacgaccgtgagcacggtaagtgcggcggcgacccttgggagcctggttgacctggatgcgcttgatgatcagagcgctggtgtcgagacccttgccatcggcgttggcctcggcgttcttgagcagatcgatgatgtgctcagcggacttcacgggccagcgggccttggagacaccgaactgctttcctgtaaaccgaaaattgtcagtcgatgttcgactccattcacaaattttcatccagattgtagaatgcacagcatcgccaataagccaagaaatccatcctcgtaatccattcatattttcctcgtcatttcaattcatatcccagtggctgtcgtatattggcgatgctattcgtcctccccacaatccgaaactccaatccatccggaaatttcttcaaaagggcgactcaccctgagcagtgcgaccggtggagccagcgtagcggcgcatgggaacggccatggtcttcttggtaacgttctcgaggaaagtgagggccttggacagcttcatgccgttgacggcctgggcagtctcacgggtgttcttgaagctgacacggaggtaagagccgcgcgcgcgggcgctcttggcctccgagatctcctgtgcggcgtaacggacctgtgaaaagcatcgctcgttagcaatgggatcgtcgttgggtgttggtgatgtagcgaaagtcgacccggcgatcggacattgaatgtgcatcacacaagtggcatttcgtagagaatgggattgcgaaaggtcattatcgatgacagggacatgcagcactcaccatcttgaaggagttggcgaggggggtgtgatggtcctcggtgatgagttgttgtcgcttttcgtcgtcgtccggctctcgcttgagccactagatttggtgcggtttttttcgctcttggcgctctggccctaagcgagccctaacgctagccgttttgggtggattacttttgagttatgtcagagcttagtcattgatttctgccccacatctcagccttgaggttcactggtgcaatcaactaaggtgaacatcttaagttgcaactatacttcataaactgatcattgatgattgaacggaaaaattttattcttcataaatccatatctatataccctattttgtctatttcttctgctctggaacctgtgtaataagctcacccttctcaacagccgaccgcatgttatccagcaccagaatctccatatccttctgagtctcataagtgccagtaccaatgtgcggcagcaacataacattaggattgctaacgagcccgggctcaatttccggctcgcactcatacacatccaggccagcagagcgcacctatagaacagccaccagtcagccgcatatccatcatggaagttgaagttcaacgcagcaaatacataccttgccagagtcaagtgccgcaaccaacgccttctcatcaattagcgcaccacgggccgtgttaacaatcacgacgccatccttcatcttggtgaactcattagcaccaatgatgtggcgcgtggatgcgttcaaggccaagttcaagctgagcacgtccgaattggcgagcaactcgtcgaatgagacgtatgtcgcgccggcttccagctcgggtgatagacgggaccggttgtggtactggatcttcatcccgaaggccttggcgcgaattgccatttcctgctcatggttagctgtggtcaggtggtatattactgtctgtgctacatacccgtccgatgcctcccatgcccagaattccgaggaccttgtccttggggtcgtggcccagggtagtgctgtactgctttcctcctgcggtgatcgggccttgccactttcctgttggaggaattatggttagtcaccgaatactgggaaagaatatcattccgctctggttagccacttaccttcccggagagcagtaataggcacgtaagcctggcgcagagcgccgatcatcaggaaaatgccaacgtcggctgtcgcgttgttgaccgcaactggggtgctggacactgcgatgttcttctccgtgcaggcggcaacatcgatgttgtcatatcctgcgccgttgtgacagacgtacttgagagatttaggcaggactgcgagcaactctgcgttgaacggaccggtgtactatgcgttgtcagtcggatcactcgaagtgaaaggtcaggccggtatctaccttggtggagctgttggaccggtagaggacgactacatcgtcatacttgccagccttgcagtttgcgatgaactcttctctggttccgctggggaattcctagttgtctattgagcaagattcggtcgcggcgcaatacgaatcacttaccttcaacgtcaagaatgatgagaggctctcccattccttgcgcgcgtgtgtgatttctccaatgaggagagctgattgtgttgccatgttgctggtaacgttagatgcgccaaatgatgtcagcggggttgctcacatttgtaaaagttctatagggatgtatcaagaaaggattgagggattgaagcgagcaatgagaagattagcaactgagaatgaaaagaaagaagaatttccaagattccagaaatcaagagatcattggaggttcaaatgtccccgctatcgcataacccccatgtcgtaacgggggctcctccgacagtgtcgtggatatagatgtacgggttttatagatcgtattcatacttatacctcaacctagaacttttctactcaatttctacatttatctgtttatacaacgattatcattaacttcatctcttcacttattactccttgatcttctaccaagtgcaaattcaagaatcatcacccccacgtcggctatccaaatctcccctttggtgcaataaccgacagcggagcacctccgggcccaagactttccccccacgacgaccaagtggggtgttttggatgtgtagaggggcaccaacgggccgagttgactccaaatgccgtcagaggtcgggtttcgctacttcttcgctatttacttcaatcctttcttttattctctctgaaactattacctactactctctacacgatatacacactatggcaagcacaaccaccaccgcgctcgttctccacggcgccaaagacctccgcctagtaagtaactccaaataataaccaactcggaccaaactaacccaaacccaggaacaacgcgccatcacccccccatctacaaacgaagtccaagtcgccatccgcgcaacaggaatctgcggctcagacctccactactacagccacggacgcaatggcgacttcgtcgtgcgggcaccaatgtgtctaggccacgaatccgccggcacagtaacagccatcggcagcgccgtgacaaccctgaaagtcggcgaccgcgtcgctctggaagtcggcctcccatgccgcaaatgcgcgctctgcaaacaaggccgctacaacatctgcaaagccatgcaattccgcagctcagcaaaagccttcccccacctcgacggcacgctgatggagcgcacaaaccacccagcagacatgtgccacctgctcccagacagcgtgagcgacgcaggtggtgcgctcgtcgagccgctcgccgtcacgctgcacgctgtgcgtcgctcacacccgccgagcaaggcggaggttgagcagaaccgctccgctggagaggagaccccggcgctggttttcggtgctggcgctatcggcctgctgcttgctggcgcgctggcggctagtgagaatttctccgcgattgtcgttgcggatatcgatgcgcggagactcaagatcgcggaggatatggggcttggtcttaagacggcgcttattcccaggtctgagactccgcctccgccgaaggatgcgccgcatgctgagcagacagcttatgcgctggagaatgcgcaggtggttgccgctgcgttgattaaagccgtcggtgcgaaggatggactcattgtgaacggattcagtcgtgtttatgactgtactggtgtgccggcttgcgtgcaggcggggatttatgctagtgcgcctggtggtgtgctggtgcagattggtatgggaaatcctatccagacgctgcctgttggtgcggccgcgctgcgcgaggtcgatatcattggtgtgttccgttatgatggatctgcgtaccccgctgctattgcgctgctggcgagtggaaagatgcagagtgttcaggagaaggtcgttacccatagactcaagttggaggagggggagcgggcgtttacacttgccgggaagggagttgatgaggaggggaaccctgttgtaaaggttattattgagagccgacggggctctaatggctctctgtaaatttgctgatgaggacgacggcgatgatgatgattgtgtttgaaaatacccgaattgtgacaatagcaaaaagatggatatatatgtggagaggattatgaacaaaattgcatatacaaagttgaggtgatgatcgtgataacttgtagggcgctaaggccatgagatagatttccacttcttatactattcttcataatattgggttgctcatttcaaccctccagccagcaaaagactctgacccgtcatgtagcctgttttcacaagcatagtcacaacattggccgtttcctcgggagtcccgaggcgaccaagcggaatcccagctgccacctcagggatagccgcagcgttaggaatcataccagtgtcaccaatcatggcaggcgccacatcgttaacactgatattgaattcagccagtcgggtagaaaggttcttcatcatgcctgtcagaccacctttagaggcagcgtaatctaaaagagagtcagtttggtattcctcagagaaggaaagaagctatacatacgacatccattgattccaccaccttgcgcagcaatcgaggacataaacacaatacgcccccaattctggctcttcatatgctccaccacccccttgacgagaatgaatgaagcgcgcaagttgacatgtatagtatgatcgaactcttcgagagagcagtcccagatttggggaatccgcttcccgtgcccagcgttcgagatcaggatatcaggtcggtggccgtgctcggtgtcgatttgctggaacatcgtctcgatgtcgtcagcggaacctacgtccactttatgaattgagatatggagctttttatctgcgtatttgctctgcaggtcggtcaccagtgcgttcatggcggtcaggttgctcgcgtatgtcagggcgagatgcactccatgttgagcaagctggtgtgcacaggcagatccaattctatagaattaattgtcagttcttcattcgccgtattggggtgatatgagttggaatagcttaccctcccgatgcgccggtaatgagcgcaagccgaccctggatctcgttaagtgacatgatgcgacggagttgatacgtatgttgacgatatgcaatgatcaagcgcagatgtaaactcttaaacctccaagtttgatctggcaaagaactgcgttgctggcctcggttacccctcggcgccatctccgagggtaaacccccgcaaagccccgcatcatttgccgtcagatttgggggtgggggtgtcacatcataagtaccacacggataaagccattaccaagcatttaaaagagaaggttgctgctcatatctcccatccaagcagacggctgccaagtctgcgagcgtggctctccagattggtacatatcggaggcattctggaacgcatccagccccaacaagccaccagaaatctggtccccggatacataatcgcccacggcctccaaatctagccatgagaagtcattcgcagggctgaatttcatgtatcccgggtctgtgactgggttcggaagggatgtttgtagtgggaagtcactattttgcgtctcttcggttgggttcgatgtggacttgggcttccatagaagctctagaaggcgagcatagcgcgacccgatgtcatcagtgccggcacttgcttgtttgagcacttcagtggttcggatgactaggccttggacttttgcttcttctgatgggaccatcattccgaatgaacgagcctatgatatcgcttagatgatatccagaagagggattgaataggaatcttaccttgtagaggaaaacggcagagtagatgccatatctaaatcgcatgagctgtttgcctcgaaataacacgcgacgaaagaaaaacttacaggtagaagcggagaggcatgaagtggagatgcttctcaggatctaccagatccaccaagattgtcaagtatgacttggccgcatcaacggattcatagatgaaccgcgaatcctgcatcgaagctacattcttgaatgtcgatcgtagatgttctcgctggttttgtaggtcggttttcggtttgacgagcgactgcgagatcgcagcttggaacgcgaaagcagttgtatacagacgcaaatactcgtatgacaactgcagtgttgctcgcataggtggtgagcctagatatgttagaaccaacatacccagcagctcaaataatcgagaaaaggccaacttacagtccaatgacccccaaagtgacttccaccgcagaatcgccagacggaagtcatccacatatttaacatagtctcccatcagcatcatctggttactagtacgcatccccgaatataaaacttcgtgaacattcccatagagctgcgtaagatccaacatagcctgaaagatcttcgcatagtcctcctcgccctcgttaaccggctgcagcgatggaaaatcctgactgacaagaccagtcatgggcccggggccacgagaccagaaagcacgtccaatacgcacagaaatcaatcgatcagagacatagcagctcgcccaggccagacgtctccgtgcctcactctcatggtccccataaggatccccacggaaagacgtgcgatccatgccgatgaaataccccgagcgcaacgcaagcccgacatgcatccacgccgcgcggtcttcctctccgcgcccaacgcgttcaatgcgaggccgcagtccctgaggttcccactcggcgagtaagagaagcgcttcgaccgcttcaacatcacattctgcgccagcggcgatgccggaaatcagctcgtgcatgtacttcgagcagtactcgtggatctcgggttggtcgaccaaatccttggaggcgatcgtcaggactgcggtgagcaggtgcttctcattggcggcgaatgcgtctagcgatgcgcgtgtgaaatacttccgcggcacaaggggaagatactggtggaagttctccgcgtagcgggaaatcagttgccacaccgtttccgggtctagggcgcacgactggacaagtctgtaggccctgatgccagtggttgggttgttgaagtctgagacgccattgcgcaggctgttgtatactgggaatggtgttggctccgaccgaacatgttcattgcggatctcgggagcgatctctgtgccttccgtggcgatgccggtcaagcattgccatgcgtctgatggattgcgcgggacagacgatatcgaggtatcatcttcctcgacggatgccgatgctggcgccggtggattaggtggcaaaaagactagcgggccaggataggatgccgattgcactcgacgattttccgagttggttgggcttgagacttccgaatccttgcctggtgagcgattgaccggtgtaaagttcttgattttgttcttccggattcgacgacctccacgatttgagccgcctaatatgcactcgcggttttcgcgtacacaacgctggcatggtggtttgccgggtttcccattagagtctctgcatgcgatcagcgcggaaccatctatattgcagatgcggggaaagactgcaaggatcgtggccgaaacgagaagaaaagacaatcttacaggtcacatcgagacttgcgttgtctgcaatgcaaacaggctcgcgaaacgcgtttggcgatatcgcgccgtgaggcttctgacggggattcttcttccatggctacaggaacattgaagagtacgaaatcaaagtcggacgtccccacaaagaattccgaagacccttactcatcgccatgctcctctccatgtgggggatgcgggaccttgtggttaaacgttttacctacttttgcctctatggtcattctctaagaacttgatattaactgctttgaatgttagatactatatcagacattgtttctcttcatatgcttatttaatagccccttcatctgttcaagtagggaaaaccacttaccgtgtcaatagccgacggctaatgctctcggctattggtattgcccggagtaaccccgcgttctcggtttggtctgattgggtttcttatttggagctcctcccatttgcttctttgcttctttggttcttttattttggatttgattccttttcatattcatattcacattcacaatggcagacgtgatgtccctattctccctaagcgggaaaaccgccctcgtcactggtggaactcgaggtattggccaagctatggcctttgccttggctgaagccggcgccgatgttatcttggttcaggtgagttatttacacgcaaatattggagagcacatgctaatatactaatagagagacaccagcaacacagcaaccaaagatgagatcattaatcgcatcggccgtaaggcatggatccatgtcgccgagctcggggatcggaaagccgtcaaagcaatcatccccgcattgcttagccaaggactgaagccggagattttggtgaactgtgcagggatccaacggcgacacccggccgaaaagttcccggacgaggactgggacgaggtgagtcgataaagcaatataaattgcccccttgaaacactatatctaattcgtggaataatgtataggtcttggaaatcaacctgtcctccgtgttcatcatgtgccgagaatttgccgcatacctcctggctcgcgacgcctctgaattcccacagggtcgccgaggctccatcattaatgtcggctctctgctcaccttccagggtggaattacagtccccgcctatgcggcatccaagggtggcattgggcagttgaccaaagctctatcgaatgactgggtcgccaagggaatcaatgtcaacgccatcgcgcccggttatattgccaccgatatgaacaccgcccttatcaacgatgcggaccgcaacgccggtatcatggcccgtattcctgctggccgatggggaaaccccgaggatttcaagggtgccgtggtgtatctggctagtcgggctagcagctatgtttctggagagatcctcacagttgacggtggatggatgggacggtaaatgtttggaaatgaatataacgtacattacttcgataaattgcacatataaatgaattcttttggcttgtcaggtgtcatgagactattgccagactagttaactatcgggttattgcctgtaagagggaagaggtaacagtggcccgtgcgtccacttgaaacctcgacaacgccaatgtcttacagtcaaaccacctcagccctggagagacgaatggcacatgtcggcttgtgaaagtggcataattaataatgtctcagacttcatacactatcgtccaaggcgtcacgcccagactcgaactaggatcaacaaggatcgtcagcaaatcatcagcaaatcacacctatctcagggggccgctaaggcttgttagaaacaccggcgtctttagtgtcaccaaggagctatcccgataggtttttcggcaatttaaacgcctcgaacagctgcaaatcagaccatataggggctttgcggaagatatgtccatcggggtccatgcttcttctcaaaactctttcagggaggcttcttccacttccatttcttccattattcgcactcttttgtcttagaagacaatcggctggtctcgattgttaaatacactctctttactatattgtctggtctggactgcctctatattgtccaatttcattcttaaaaaggaaaaaggtgccccttgcctgcatgccagatacctgaaagtgaatctccaacgtcgattcttggtgacgtgccagtttctcacaaattccaaaagagcagggctgttttggctcgctttgttgacttcaacctggtcattcactttgagacaaacctcattgttcattgtcaaccccaaacagaaccagccacaatgctcgcgttataagacattgtctttgtcggaaacaatcaaagaggtctccatctatatcgacgcactttctccaaccctgtttataatccatttcatctgatctatccaccgtattcgacttcgattccccgcaaacgcccacatccaacatctcaatctttacattttgatctcggctgttgagcagctgcttgaaacatacacatacacattgctatatcgactaggcggttgtgcaacatcgacagcacagccttgcatgtttgctgcccagaccgcaacttctttctctcttcgatatctgcgcctgttcaatggcagcaacccatccgcatatcgcggcacgagggtacgggtcaaacgccacatacatatatgagtactcaagggggctgggtggcgtggacgtccctcgcgatgtgatctttacccggatcatctacggttccctgtgtgtcgtggcattcgcactgttctgtggccgagtcgcccagatcagccacgcatatctccgccaaatcaccgcaactagcgcaagcaaacaccagcagaccttctgggcccaggaacaatcaacatggtggtcaaacatcaagaaatacatcctatacgccccattaggaagcaagagacacaatcgagagttacagctttcttccgctgtcaatgtcggcactttaccctcccggctgcagactatcttggtcgcactctacttcgccagccaagtcgcatactgcttcatcctggactatagcgtcaaccacaaggcggccttggtcgccgaactgcgcggccgatccgggacgctggccgtcctcaacatgatcccgctcttcctcctcgccggccgaaacaaccccttgatcccactcctccacatcagctttgacacatataacctcctccaccgctggctgggccgcatcgttgtcattgaatcagtcgcacacacagccgcatgggccgtcaacgccgttgacgaggaagacttcacccgtatgctcgctcgcgtacgtgaaacccccttcttcctctggggcctcatcggcacagtcgcaatggtcttcctctgcctgcactccccctcacccatccgccacgccttctatgagaccttcctacacctgcaccaactcgccgcagtgttcgccttcctaggcgtgtacctgcacctgcagatagacaacctcccgcagcaaagctgggcgaaagcgatagccggaatctggataggcgaccgactcgcgcgcctcttccgcctcatccacctcaacatctcaacctccggcacaacaaaaatggtcgtgcaagccctcccaggcgaagcctgccgcgtgaccttccacctcccaaaagtcgtgaacatcgacccaggctgccacgtcttcgcctacatccccaggatctcctggtggatgtcgcacccattctcaatcgcatgggccgaaccaagcacaagcagcacatcgacattctccccctccccaacacaagacaagcgatacaatgacgttgagaagcaatccgacctccccaccaagccctccaaacccagcacgcaagtctccctcatagtcggcgcccaaaagggcatgacccgccgcctctacaacctcgccaacgcagccccctccaaaaccctcactctcgccggcttcatcgaaggcccctacggctcaaacccagcaaacttctccagctacggcacagcagtgctcttcagcgccggcgccggaataacccaccacctgctgcagacccgcgcgctcgtcactgccgccgcgcagaacaccgccgcaacccgcaaagtctacctgatctggtcggttcgatcgacagaccacctcacctgggtgagcaactacatggaccagatcctgcgcctgccgaaccgccgcgatattctcgttgtgaagcttttcgtctcgaagccgcgacgcgccgctgatatcgtcagtccgtccgctacggtgcttatgcattctgggaggtgtaggccggatgtggttcttgatgagattttgcccgggcggaccggcgccacgattgttagtgtttgtggaccgggcgcttttgcggatgaggttcgctcggcggcgagggagaggattgggaagggggctgtggttgattttgcggaggaggcttttacgtggtgaggtttgctttgttggtttatatgctttttgttcttttgccttgtcttttttttatccccgtggggtttcttgtaattttttttggtttaatgcactcttttacttcttttgtgctgcggttggcgactcatataacaaacattgcttaatgtctaactgtatactatcactatcataatctccggacttttcctggttacatatgaagatatcttgttgagaacgaggtctactgtgcaagagatagtaattgggaatgtagtagacaatgtaattgaacaagaggctctatgctagtgtatgtattatctcgggcatccctatctgcaagaccaagtgtaatatgtaagaaaaataatgtgcaacaagaagagcggaggattagagatggcggtctaatgcagagtatcttttaggagaaacagtagccatcggaagcccgttaagtgtcaagaagagaagaagagaaaagaaaagaacccaagagatgataaaagatcaagcagtcttagtcttcttgctgcgggttcccttgggcacacgagcaagccagtagataccaacagcagcaaatatgttgaagatgatgtacgcccacatgatgccgaagttgcgccatgcgtcgctgtagtaactcagcacgcccttgaggaaagtatcggtcttgtcgacgctgcagaaactgcaatcgctagtggcattcgcgttctggaggtagccaccagcaacttccatgtaggcgctcatgtattggtaacaggtatcgccggcaaggggctcgaagtggagcatctcgacgggctcgcagacgacgtttgtgccggatgtgccggtcgacagcattgcggagacgaggtaggtgaatggtgagaggcggtacatgaagatccagaagcggggcatttggtccggggtcgcgaggacaccacagaagatcagacagagggagaatagcaagttggcgatattgccacctgtttcggctagctcgataccagcaatcatcatgtgggcgaaggtgcaggtgaagatcatgaaggtcaagacgagaagccacatcagtgcgccgcgctcgtggagatcatcggcgctggtgttgcgttgcagtccaatggggtagtaccagcagacgaagatgaggaccgacatgagggcgttccaggggagttcgacaatgatgtttgcggacataaaggcttgccaggagtatgatttggaggggcgttcacggacttcgtagagggagcgttgggtgacaaagtgcggcatgatctgttgcaccaagttgccgaagactgtcatcaacatgaagacactgaacatttgattctgcagtccttgtatactgttctgggcgtggaagaaggagaagccgacgtagagcgcagtcaaggtacatagcgcaatcttggaatagatgtagactggagttcgccagtactggctgaacacgcggaggagacactgccagagttgaacactgaacggtgcggcgaattcgtggaagctggtaggatcgttgtcggttgtggcaacgggtttcagagagaggctggacttaagctcggcgaggtgattttgcacttccttgcgctcagggctatcgcgccacacggcaggccagtcgatctcactgtgggttccgggggcagctccaatgacctcaagcatccattcggcaggattggcttcaggcgacagcttgggcgcaccatttcgttcaaagtagttagagagcgtagaagatttttcgccaatttctccgaaatagacagtcctaccgcccctggcgaggaataggagacggtcaaatcgctggaagagcatagcagacggctggtgaatagtgcagagaatagcctgaccgtgcttagtcaaggtatcaatgagatccaagatagaccaagaagtttgactgtcaagaccggaagtaggctcgtccaggaataaaagcagttgtggcctggcagctagctcaacaccaatagtaagacgcttgcgctgctcaacattcaaaccttcaccggggacaccgactacggcatccgcatagtgttccattccaagaagcttgatcacttcctcgacgtagtcgagtttttcctggcgagagacgtgacgcggttgacggagaatagcactgaagcgaagagcttcgcggaccgtggtagtgtggagatggagatcctgctgttggacatagccagtcttacgttggaaggagtggtcgcaaggacggccatcaaccaacatttcaccagaaacaacccccattgtcacgcgcgtagcaagcacatccaagagagtggttttaccggctccagaaacacccatgagagcagtgcaggtaccgggcttaacccagccgtcaacgtggtcgagaatgcgacgttcctctttcttgatgtggatgtcgtaacacacgtcttgccattggaagatagcagtttgtctctggattgcggcagtggtttcttcgccgtagctagcgccatccttcttctcggcaggggacacgctgtgtgtttgctcgacatcatcttcagagctgccgaccttcttgggggcgtagccgcgacggaaaagcagaacctcacccttggacttggactcggaaatgtattcggtgccgatgaggtaggtgcacatgaagaaaatcatgaaaccaatcatgattcccagatttctccacttgtggccgtgagagtactggaagcttgcagtgtagtaggcctcgccgctgatatagtcctggccagccacagctcctttcgctccgcagatcttgttgtaccgaccgacatccgtgtaggattcacccaccgggatgaaagaacccgctttgcatgggaaatcgcgaccgtggaattcgttcacgatcaaggtttcgaaaccataagcaatcgggtcaatgtagttcatccagcgagaccagccaagcatgttgcgggttggtatagtgaagccagtgtagattaccagaccgagaatcaggatggcggcgggcactagagcctgcgacaaagtacgcgagtaagaagcgatggtacggaagaccatggacatggtcatggtcgtcacgaaagagaagagcagaaaggtgaagaaagcgccgccggtttggcgaagaccagtcatgaaatagagtgtgatgttgaaggtgaaggcattggtgattttgtacggcatatcacacagcattgacgagattgcttcggcaaacggatgatacatagcgtaacgggcttgcttttcgacaataggacgttgcgcgtagagagtgagaatctctagagcactggagaacgagttgagaagaacggcgaagaagagaagggcaccgcgagagtagaaactggtcacgtcgccaggcaactggaagaagaccgaaccaataatcaatgccataatggtgtttccaatcaaggcggatatagtcagactgtagtcacccttcaaacgctggaaaccacgggtcacacagatttggacctgctcggcgactgatagggtgaatggagacttgacacgctgcctcttcgactgcatagccttgcgagactcgacgaatttctcgtaggactcgccgccaatgggatactgctcatcgtactcggcaatctccttcagaagctccttgtacgcagcactgtttttccaagcagtggcgaactcatcgggggtacggggaacgacgttctcaaagccaggtttgacgactcgctcagcggggctcgtaagcgaggtcaggaaatcagcggtagtctggcgctcgggacactcgaagcccatgttggtgaagaattccttggcctcggtggtacggccgaagtagatctgtcggccctcgtatagcacagtcactttgtcgaaaacatcgtaggcactctgggatgcctggtagatagcaacggcacaggtagtgcccgagtacttagacatcaagttcaatgtcttacagaactccagagcattggcactgtccaaaccacgagtactgttatcccagcattggagagggctgccgcagagggtggcctcggcgatactgacacgcttccgctcaccaccggagacaccacgaatgaaatcgttaccgacctgggtgttgatagtgtgcgaaagaccaagcatagccatgacgacatcacgcatatgctctgcgtattgatcgcgagtgacgcccggcaaacggttgcgcggggcgcgagcgagagcagcgaacttcaaggtatttccaaccgaaagctgagggaaatgcacatcggtttcagcggtgtagatggcctcaccgcggaactggctgtgcatctgcttgtcggagattccttggtagttcatatgagagttaccatccttgaagatgccgttcaagtctcctgcaatagtcttcaagaaagtcgaacagccagatccaggacggccgagaacgaccagcatctcgccgctcttaacgaggccatcgaagtcgcggaggatctgaatcttctgcttgccagtgccggtcatcgcacggaacacggcgccgatttgcagaatggagttggccacatccttttggtaatcggtggggctgccaaatccgtgcacactgaggtttctgaaggccaggcccgcctgacgcttcgggtatcgttccgggtcgcgagattggatggcaaggagattcttcatccaattcttggggttgaaattctcactgtgaggattgagggttgagtcctcatggacttcgacgaaagggttctccgcattctgggttgagacagagaagtgtgttgactggcgggtgagttgccgggccaggcgagtgacctcggcctcggtgtagtcctcgttgccaatctcgcccttctcattagcggtgtcatcggtgctcacgctggcggtggggtcatggcggcgagcttccatgttggcggaatgggaatcctctccgtcctgggtgctgggattcaatgtccctaggagcgacatgatgaccttccagcacggtcactgtcgaataggggatggaactgattaagtggggtagtaatccctagaaaagacggataggggagggaaccatcaacgggatgagtatagagagagggtgtacgaatattagttaatagaataacgaaggaaggcaatcagcgaagaatttgaattaagtacggatatgaaaagacacaaaatcccaaggattcaaaagatctagagatcgggactcggaaaagctgtatcctttgcccggaaagaaaataaaaaacggggactcccgtcgaaactgactccggggcggagctggtgactttccggagattccaatcacgaattttggtttcgtatttttctgagactttagctagtccttagtggctgattgccaagaaactgtcgccattttccttgaatttgttgtccacagaggtaaggtagagcatgcgatggatgattctacactgcatgtacctggtacttccgcacgacagccaaacaaagattacctaccaggcataatgatgtacctgccatgttcttcatacatcctacacgtgtccatgccaggtgggaaaacaaggtttccagactcagcagcccgggaccaccgctatccgtcccacacagggctcggatgctcgggtgcgatgcatccgagcggggctgactcagctattcctgggggatccatggatcttagaacgctaaatcgcatgtcacttccacccactggggcaattgttaattccatcttatctccgtcccctaaccccccgtacttggcctcctaaccccgaattacatggatgtatatgtatcttccaaggttgggaaggaatggaccaaatccggctggtttcttctgagtcatgtctccggttatgaaattccttgcaaatctgacgtaccaacatgtggcactgtcagatacgtgctgatgaacccttgcatgggggctgttatgcggcatgatggttcgttgatccttggacgagcctagccagacgctaggctgcaatgcttacgcttacgccgtgctaaatacggaatatgccttcggttagcagacaatttcaaaatgtgaccagaatgtacagttataagtcggccacgcagggaaagcgaaatattgaatcataatagtctaaattgtacattggatattgttaagaaaacaacagcggtgtgtcagtcttggtcttccaaggaacccaattatggagaccagtcacattcaagacatgtcggtcaccacctcgtcatcatctgcatcgtcttcatcctcgtcgattggttccaccaacagattaccgccacgcccaatcttctctctgatcgaccctccctcatcaacagcatacactactcgaggcatcggtgagaccagtcgaaatccgtagtggtgcacaaacccctccggcgcactcaccacaggacgctctgtatcctgctcctgtaagatctcgtagcactcaaccaccgcgtagatctcttcaatgtctgcatctggcgcaaacttacgcatgatgcgctcgccggacgggagccgcacgctaatacgaacggcatctttgacatccggcccgggctccgcgctaagcgattgcccgcgccaaagcttccactgggcgagatcgcggagccgttgctcttcagccgcctgtcggtcagcggcttcctgttcttcgcgttgacgtgccaactccgcttcccggcgctggcgcgcccgttcacggtcgatcgccagcgaccgctcgtaggctgagtcttgctcttcgcggaggctgcgcgaggcttgttgctccgcgcgtgaagatcggagtcgctccaggggctcgctgttagatgtcacgactgtccggagcttgttcacgacctcggatggcgtcgtgagacctgcgatccgtcctacaacagacatcgcggttgatgaaacatttggtgtatggacgatgaccgctgcaaaggggaatttggtgcatttcaatgagttggcgacttggtatgcttcggaatctcgcacgttgccgccccacaccaggaggttgttctgggggtcattgatgaattctacgacctcaggtgccagcagagtatcccggacccagctgtccgtatcgtcgtgctctggagataagagaatgaccaggaggtacttcaagtcgcgatgggctttctccagcgccatgttgtatccgttctccaggaatggaatcgggatagattcatattcttcttcgaactcgcggataaagcgagcggcagtatctttgggaccgagggatcgacggccagtggtattccggcgagcaccttgcagcgcggggttcgctgtcctgttaaacaagcgtggcaaaaaagggaagaggacaccaaataggcggaatgaactgcaaagaattcggtataccaaattaaatggagtgagaagtaggctaagaataaatggaggtcggtaggttggctggtctgccggctgtaagttaactcgtggcgccaaatctgtagctgtggcacgagcaacttgcgacaagtgttcggtcaaatcgtcggtcattaaattctgggttcggcgattgggttgggggggaggggggcgatccaaggcagcgcgggcttcttcaacgggatctgggccttcgccatcaaaaaacttggatatggcaatctatcatgcggggatcagttaaacgctcgtacgcttgactggaagtcggggaagatagaccaacctgcacattccattgtgaccgacgtagtagcggaattgcttcggaaggttcctgactggtgacagccatgtacatttctagcgtagacttctcgctatcagaaagcccgtccaggtcaacctcgggttgtgacatattgttgtagaagggccgtaagccataaactcagggatagaggtggtatcaaaagagagaaaaaggaacagccatgaagcggaagatcatttgaggtcagtcattaagcacgtgcagaatttctcatgcgtaaatggtaagaacgacgtgacgtcgaggctcaagtggcctcaagaagctctcgcattgatgtcctgaccgcctggtccgtgcttatcccccttcgctcgagttcggttctcgccccgcgtcttcgtttccatcagttctgtcgcttttaatcattccttgggaggagagacgacttcggtcttatccttatatcccattcatgcctattgttatcggctgagataccgcccgacgtccgtgggctctcccggaattgacccgccgccaattgcgcggaccgtaggtgacttgctttagaatcgaaacaggggaatgcggttttcacccgatagcattctttgttccctaccgagtccggtttcaatggggatctttttgcgctgatccgcaccaacaaagtgggtatcagctagatatcatggcgtctgccggaaagcctccattggaggatgctcgtcggacgacaggatcaccgaaaatgaagagccgtggtgagtgtgattcgaagtcaaggctggcatttcagttccattttaggactgagatgggcaagctggaggtggatgaattcgagatggaccgagttgctgataacaatgattttgcccgatagagaatgcgaaagacacattgtgccgtaatgtgaccatctatgggcgatgccgctatgaagacaaaggtattgcgaacctgaatcacggccagcgtgggtggtgaagctgatttggaacttttgtatccaggctgtgctttcaatcatgacccgtcgaagctcaatgcaaatcagtcggataggtgcgatgaacacttggtctctatacgacaactggatgtattttgctaacaaggactgtttcgtttgatagcaagaagcggttcaatgtcgactcacctagcttcactccatccttgctgtctgggaatggtgtatcagcaccaaaaaagtccacagctatatctcccaaagctgccagtgcagctccttttcaacctcgaacaacctcatcacgtatgtgctccatgtggagagggagggaggttccaaaagcattcactgacgtcagaaaaaggttcaaacacgagtacaccaacaacacggtcagaagcagtgcaagactgggcggtggccgatgtacaggaatttattccccagggatttgagcacgtggtcagtcgtccctgcccttatcactcgattcgcatcgatttcctcccctctacctcttgtcttcttacccatccctctttacctgcactagccctattgttatcatcatctctatcatcacgatggtgctaggtggcttgtctgccatggcatctgaattcgatcctgaatcttctgattctccccgatacttcacctctcatccgcctcagcctgaaagccctgggtggttcaacagtattctgagcaatcgtgctaattttcctactcagacgcctcttcagggtaatggaaacggaggcatcacccccacgggtgcatttgatccttttgttactaccccaactgccatgactcccggtgccgttggccctgtttctgccaatccttactcccacgaccatactggcgccatgggaggtgctttctttgcaaaccaaactggattccagcagccggtacgttggtttccattggatcctctttgtttctttgactgatctccaactgcccaacagatccagtaccatctttatgccccaattggccctcacagccagaacacattgggataccagcgcaacgttcatgatctttttattcctaacgacttgcgtgaagaactgcagaagaaatctgcagctactttacaaactctccctagtatgttagacatcacccaataataatttttactcatgctgacgaacttgaagacacccaactccctgcccaggtcgactacttccattccctcgtccctctagatctcagtcatcagaagaatgctgcaatctttggctacccgagctggatctacaaggcccagtctagcaaagatggcatctattatgctcttcgcagacttgagggtatgacaatcttcccgtctcttttgtagctccaaactaaccgtgtaggttatcgcttgaccaatgagagggctatccgttccgtgcaagcctggaagcgtatctgcaacgccagtgttgtgaccattcacgatgcgttcaccagccgcagcttccaagacagttctttgatctttgtgaccgactatcacccactgtccaagacccttgcggaccagcatctcagcgctggaacccgcttcccaggccgtcagaccaatgctcatattcctgagcagattctctggggctacatgacccagatcgccaatggactcaaggcgatccacgccaatggtcttgctgcccgagtgctcgagcctagcaaggttttgcttactgctaagacccgtgtccgcatcaacgcctgcgctattcttgatgtggtgcaattcgatacccagcggactatggctgacctccagcgacaagatctggtcaacttcggccaaatgatcgtcacccttggcgccaactcacccactgtcatccacaacccaaccaaggccatggagcatttcactcgcgcctacagcccgcagttgaagagctctgtgttctggctgttgaacagtctgcagaaggatcaggagcgaagcatcgacacttttatcactggcatctcatcccagctgatgtcaacttttgattcggcactccacctcgatgatcagctgaactctgatctcggccgtgagttggagaatgcacgacttgtgcgcctgatggccaaactcgggttcgtcaatgaacgccctgagtatgaacttgaccagcgctggtcggagagcggcgaacgctacttcctaaagcttttccgcgattacgtcttccactcggtggatggccaaggtgatccggcggttgatcttggccatgtcttgacttgcttgaacaagctcgatgcgggaactgacgaaaagatccatctagtcagtcgcgacgagcagagttccttcattgtcagctacaaggaggttaagaaggctcttgagtcttccttccaggctctgatgaagcctgctagacgcatgcactagcaagttttcgaaagttctcacatggtactcgtaaagatatcgcagcttgctatgtttgtctcatagtttaacccaagggttacatcttttgctttaatttgcaagcaccgatatcgccaccgtgattgaaatacaaacataggaataaagaaattcaaattgctttccttggtcgtaagcctgtagacatctctcacaattctcctcgagtcatcccgtagacgcaaccatccaatctccctacaagctcctcaatgatcagttccccatcttcatcttcattttgatcctgaatcttcctggggggaatcaatacccgatccaaaacatgcaccacgccatccctcgccaacaaatccattcgtccaactctaccaaacccattaacccgcatatcaacctcaccaaaccccttcttaacatcaaccctcaactccctcttcaacaaagtcacaagccgcacattcgcatagtcctcctctagtccatccccacgtccacccttcccctcgccctcatgcgcatgcccaccatggcgacctgaaaacaacccatgggacgttccaagactactatacaagacatccgagtaaaacgtctgatttagcacaatatgatactgcatcaacgtacgcaggcacccctcaccccgccgcgagaaaagaaaccgattagccttctctccgagccgtctgaaagcgacgttcgtgggcacgaaggttgtgccgccctgtcgctgcgccgggtcaagattgtgggcgagtttcgtgcgagctagcgccaatgtgaaggtgctgaagtcggttggtgcttggtgcagtatcgtgcgtgtctctcggggtgggtggaggggactggttattatgtggattattccgtttttggatttcttaggtgaggttagtatctgtcgatgtgtgccataaattgatgctttactcaccatgtcggctgccacaaccctactcctccggttcaacatcactccgttctggtgctctcggacaacgatcctctgtggtagagtcgattccagagctggctctgtcagcttcgtcggtagcgtcccgtggccagcaatatgctcgattgaaaattgaccgggcaggatatgataccgcagcaacttggacatgagcttcggactggggccatttcttccccgtggaagtctctctagggcacggttcgtcagcgcgaagaaggtgtggtttgccgtcgtgccatttaggatatcaatcaggtctttgtcgtcggcgatgagctcggcgagtcgggatgtatgctcgctttctctgatgagctcccatgtcgtcttgtccgcgtggcagaacgggcctggacaagcatcgattggccggtgtggacggtgtcggtatctgtcccatggtcttccgtcgcggtcgtgtctgtcttcgcaatcacctcggtatccaggccattctccgtgttcgggccatcccccatgtctgggccgatcaccaccgggccatcgcccgtagccaagccaatcgccatgctccggatattcatcatcatcgcgccagtcaccgtctcttccccagcctctatgttcatccggggagatgcccagcaggctcatctcggcatctgcttgagatggatcattcgtggctggtcgagtctcagagactatctccgcgaggatactctcatctaggatgacaaaggccgaggccaatgaagctgccacagataagaaaaggtaagtggaacgcataatgccgttatcgacaggaaatcggagtccaatgcagatgctcgatcacacaatggtgatgtacctatataggaaggcctccctcgtcgaacccctcgactttcttgatcttcggttgtacgagtcgtacaaagctatcacactacatcagatagcatagatgaaactgttaaatcctcgctgatccggtcgtcgtaccgtggagactcgagaaacaacttggatcaacaagagcaccagccatcgctgagaatatgttacatattccaatcgagaccagaagcagcggaatacgaataggatacagatattcggactatatttggcagtctcagttccgggctaacttgagatcttgcattcacgtgcaattctaatcttcttcttactagaacgaaaaccaggcagtatcggaagaatcggttatacacgtcaagatgtatttctcacttatacctgtttttccatatagcatttaatccagatccggcacaggcagcccattgacaatcttgactttccgtcctagcttgtccagcgcgaccttggagttatgcgcacgcaactctttcgtctcttcgtcggagacaagcacaaagtcatatgtaaggagagcatggccctcggggacattatatttcctagcgatctccgcgtccgccttaccaatttctacagtcaaggaatccttaacgccgaagaccgcatcagatgtttcataagggtcatttcggagatagagagcgctagaacgcagattagcataccatagcccacacaagtcaaaaagggcaacagcccaacatacgtaaccaaatggtcaaacccctccttctcaaacataaagtgcatatgcgaaggccgatacggatgccgccgcaacatctccagcaacctcccaacaggcccatcatgcggaatcggatacggcaccggcgtaatcgccataaaccaaaacaccccgtcttgatccgagcgcataacacacctcccatccggccccaccctccccgcatactggacatcataatggcccgtcgaatccgtctcccagatatcgaccttgacgtcgtgcaccggcgccccctgcaaatcccgcagcgagcaaacaaccagcaacggctcgccgtgcggatcatgcgacatggacgcgccggcgggcatttcctcggcgtcgtgcgtgtggaacgggcccagcacggttccctctgtggagcccttcggcttggggtggtcgattgagtcgacgaggatcgagaggcctaggacgtcggacagcaggatgtattcttgtcgtacgtctgtgcaggcttggccgacttctgttaggaagttgaggccggtcatccattcggcgctgctgagacgggtttcgcgcgcgaagtcgtggaggtgcgttactaggcgttcgaggatgtattttaggcgtgggtctgggcagaggctgttgatggtgattacgttcgcggtgatgttgtccacggtttggtctttcattggggggatcttgattttggaggggtccatggtggggttttgtagatgttgctttgaagtgtagaggggaatggtagatggtgaatggtttaagctggaaaatccggggttaagctgtttatatggtatagaaggtggggtgtggttgtttactttccccaggagatacaagttctctcaatcaatcagacgctctcgaatgataaccttcagattgtttcaccccgcaatccccgctgatccccccgtcggatgtcagatcggatttatatgccgtagctcttgtatacgacggggaaacctatccgacgggagtctttagggcagagtatatatccggccccacagatatctgaatccattctagtgtatgacacagaccaacgtagatcagaggccacgggcgtcgggcattgaagaagtagataatattttacatagtcattctaaaggagataaagtagatatgttcaatgagagaagaaaagaaaaaagaaagaaagaataacgctaaacagagggatatctaacatagtactcccacacccaacccattgccaatatgtaaaaacaaaagaaaaaagtacaaatcaatacacagaaaagtcgatattttacgcatgcaccatacgccgatcacgatcacggtcacggtcacggtcacgatcagcctcacgttcccgttcccggtcccggtcataagaaccagcattagaagccggagccgggcctgaagcaggaataacaccggcagcagcactcatacctgtgtgttctccacgctcggcaccaagctccctcttctgcacagcggcagcgacgcgtgtgtgatgatcaacagtatccataatagcctgtctaagacgttgattggcatcgggatcttcgtcctcggagcgatccgagacacgaccagcagggacatgagggcggtccctcttttctgtctcgctcactgcccgtcgcggggaattatcacctgaaggaagctccatcgggaccgcagagccaggagccaggttcggggccgaaggggccgactcacggcggtgttggtagtaggcgttgacctctggctcgaagggcggttctcggggatgctcgcgctcggcggagatcgggggtagtggacccataaaccggggtggggtgacgtttgagctggagcgatccttatcgggacgctcgttggataccgttgaggtggtgatgcccgcacgcaatgctgccacttcgtcttctttgacgtcgcgccaggagcacttggcgtgtttcttcgtgcagccaacgcaggctgtgaggttcttgagacagtccatgtggaggcggcggcagcggtcacacggtgggatgacgcgctcgccgcgctggagctcttccatgcgagctatcatttctagcttgaaagggcccccgtcgtctttttcttggtggattgattttggcggtgggaggagggatgatggggtgcttgggatggcgactggggttgccgtcgccgggttgtaaagactgtagtctgctggatcggaggcacggggccgtgggagtggctgagggttggctgctggggctgctgcatcttcatagccgcgagcgtggcggtcagccgttgtgaaaaacctcttcatcagatctgcacgggtggttggggaggcacctttgatcgattgtccgttgatcatggtgacattatcggtggattgtgagaacatgaattgagatgattgggatgtcacagggttctcctcggtgtgctcgggttcagggcgatgggcgttgacagcgacgaaaccagacggagaggggtgagatgatgatacatggccgttacctgagccatgaccgttggcatcgcgccacacttcggggacatttcgggattgcgtgtgtagagaagcatcgttctcgcgtcgagtgacaatagcattgcgacgattcttcaaacgatggttaagctgtcgcgctcgagcagagacttgaacacaaagattgtcagtcaactcctaaactgatatacatagtgattccttaccttgatcagccatctggatgatatggtacaagttcttttcaagaatctcaagcgcgcctagctccttttcctcatcctcgatgataggctgaggtgggatcatcttctgcggcatgccagaggcaatcaaaacgaagtcctcctcgctgatttccacgcgacactgcttggtatagaactggcagactcgcacgccattgcgcgacttctccagattgaattgctcgggcttattctttgcgaattcgaccacatcgagccaggtcaccgtgggtccgtctttaccatgggatttcaacacctgcggcggtccatcgaacagacgctcgaagcgcttgatcaagatcggaccgagcgggcatgcgcccagatttccggcaatgctctcgtgacggtgtagaacgccgtcgtattcgccgagtagatggatgatcgcgggcatggtatcgtcgatggagacgagtgggaggttgtcagggtattgccgtgccagataatttatctgcaggtggttcgagtgcgtcttgggcattttcgatgccatgccatgatcgttggtgggagaccgaggccgcttatgagaagacgactccgttgttggggtgtgagattccattgtgggagttaggagacccctatgtgcaccctggagtggtgtaggatggtggaaagagaggaagagaataagattgggaggaaagagaggagaaatcgcggagagtgttcagataagagcgcgaagtatgaaactcgcgcggagatgaagcggacttgcgcggagggaaccggcaggtgactcctttttagaagacttaagctacatccatgaaggtggaggaatgagaagagaagtgtacgccttcagagggacggaacagcgcacggggagtggagaggaaaaacgtgatctggatttccggttggagtcccggggcttgaagagtcggttttatttattttatttttttggtttatcgtttgatcattttcctgtgattgacgaatcgtgttacgcagcaattccgaactcgcacaatgtgaggatctgccaccaaagtacctggtcttaagttgtagggagtcctcagcggagtcccgccggagggttccgctgacctgcgatacgctgcttcaactacacagttacaccttgcctatagtctcacatattttgtatgcagaatggcttctacatggcagtcgatcattctatacatgacgactgttatctctcgaaaaataagcctttcagccttgtggagtgttggtttcgctgatgcctgaacgggccagcgggctgaaacattttggtcccggggagctcggagggaatcacaagataatcatctggcctgggattcgatttggaaaaggaactcgaattggtacatcatattctgaatatccatagatatacatacacatgcaagtacgtggaattcaaggaatgtatggtcttcaacggtgaaatgtccagacagctgataagatacatgtaatctcgctgttaaatacctccgagcgggattcctcacagccgtcaagcgcaaaaatacagcggtaatcagtaattcccataccaaggcggactccttcctgcctgaggccgccgtccctaaaaatccctcatagacgcgcccaccttgcttgtaccttccgctctcccccagacaacagagaagataccgagatacccgtctgtgtccatcggatccaagcttttattccctcacctattatcttccttgctttttctaaatccctcaatttcacacgccatgtctgaacgaggctcgttccgaggcggtcgcggtcgtggaggccgtggcggccagggccagcagaaaagtggcggtggtggcggtgcacaggagaagcccaaaaaggaaaacatcttggatctcggcaagtacatggacaaggaggttcaggtgaagttcaatggtggtcgtgaaggtatgttggattatctcttctaatatttgcttattatctttctttttcttctgcttttggtcttgacttctcatcgcatccatctatgaaccatatatgctaactccaataacagtcaccggtactctcaagggttacgaccagttgatgaacctggtcctcgatgacgtaaaggagaccatgcgtggtgagttccaacttccttacttgaatctaatctattatctctgcttatactaacccccacagacgaggagggtaacactaccacccgctcaatgggtctgatcgtcgcccgtggcacgttgatcgtactgatctcccccgccgacggaagcgaggagatccccaaccctttcctgcaatcagaagagtaaaaaaaaaaaaaaaactctctttcacgtattatcttctttccgggtttcattctttccggatcgggacgtcatttcaggaaatggacatcctgcatctagttggagtttcaaaacattacacaccttaatgtcccaatggctttcggcgtgcgccggaacatacgctcatcagtagctacgaagggaacgaacgcaatatgatggtttcgctttttttcttttctgtcgacttggaatgtgcatgataggactgctactgtggtgcagttctgtctttcgtctctattttcttctcaagaggaagtgatgaatttgggatcggctcatgatacatagcaccacaaccaaactaggatataaccgaaaaaaatcaatatagtcaacacgagagctatccaagcgaactgaactccgtaggtatcatgtattaaaagctaacataatatattcacatactatcctgtacactcccccgatcgccgatctactggcccacttccccagatgtaggacccaccgtctctccaaactcagcggagtcatcggaagcatcactatggtcatcgggcaaagaaacccgccgcggctctgcatccttcaaccttcttacaccctctgcctcctcgacccagggcccgaccttctccgtgccgtcgatatactcggcagcaatgcgcagattcagacccgcgctaagggcacgctcgatgcgggtctcgcgattctgagacacaagcgtgcggaaaacgtgcacgaagaagccgccgagaatatcaacgctccagtcctccggaacaagctcaagcacttcacggacatcgaaccacgccgcgaagcgcgcgaggagatcgcttgtgcgctcgatacggtcggacacgtcctcaatgtggagaaactcgtcgagcaggtggcggaagagcgttgtctgtaaggtgtagtctgctagttctggtaggatgcctgttgaagaggaagagctgcgcggaccgccgaagacacagtagcggattgcggagtcgtagtcgcctagcccgtgtgtgaggagatggagggccgggctgtggtggccttgtaggccgtcgaggataatgcattccgagactagctcgttctggaatggctcgatgcgggtgaggacgttggggattgagtagctgattcctgttgggaggggttgcgaggtaaatcgagagccggagattccacccagcagctgaagtaaccggagtcgggactgccaccagggctctgtgggggtgttctcgattatgaagtttaagtatgtcggtttgggagcacgcagggctcgataggtggagtaggattcggccaaagaagcccgtgcttcgggggatgactcaagcacggagagtaccgtgtctaagtagtatgagatcaggtcgtcggcatattgcgtgtactatatcccggtcagtgagatgtgcatggactaggcaacatgacgtcttacattctttgcaaataccaggtgctctaggtagacctggaccgcgtttggagctcgctccttgagtaaagcaacaacatccgccggttcgagtctaacacggctggcgttgtctgcgaatatctggatgcccagattggggtttcgcccagccagccaagagccatactcttcaaccagctgcacgtcctttatcttgaccaagtacctgcgcatctgcgtctccacaccatccgcggagacctctccgccagcgtcagtctccccatcaacgattcgctgccaggttttgagcacgtttcgagccatctttcggctttgatacaaacggcttagcacatagagccgcttgtatgtttccaggagcatcactgctcggtcgaaattgcctttccaattgtcgaccagcttattcagctcagcgcgaattggcgacgctgcccgctgatctcgcgtcaggtaggcgtcttgttccaaggtcaggtgcaagagcgcagcatctgtgctatctaaaacatatgtctcatcggtgatactaccatatccccgcttctgctgccaggagagaaggaatcgtttcaccatattgagaacaggactgcgagaagcatccaatccagaggattcgatgcctatcttcccgacttgttcaagatattgttccgccatgcttgccagcccagcgtgtatccatataccctggggcccctgcaaaacctcgcatcgcaacagaggaataaatagcaatgccaaacgcggatcgaggttacctgccagcagcgctttctcggtgccatcgattgccgtggcatcacggtcgtctggctgcatggagaggaggtctccataaagcataaggctggccttttgtttcacatagctcaatccaataaattcggcctcggtctttggctcggtgttctggacggagagtagcagatccagaatggcatcccgacgcagcaccgtgtgctcgttctcttccgtttcctgggccctctgcagggtgtcctccagctggactatcaatggattatgcagtacgcgccatatttgagatccagaccacatgacaagactgctctggaccttgcctagtccacgtgcaaattttgcttcttcggcattgcgttgagcctcccagccttgggttgctgagccgtcgctcttcttgattccctccgagtcggccaattcttgcgaatcgaacagctctttctctttttgggagtgctcgatagatgcctcagttctcgaatctgctaccgacacatgcggtggcagcgtcgggtttttgaggcggaccatccgcaagagctgcccgatttcgttgagctcaagatggctagggctgagggtatgtcgaaggccgacttgggattgtgtctctccgggagaaggtatctctaaccagctcttggtccgctcaatctcccctgggtcgtcgtcccaacgttggatttcgagtcttgttcggaacttcccaccatcttcgtcttcgataacagcgagaacaaactcctctttggcatcttcactagtctgaaacatctcatcattttcgtttgtgtcaatcacaaccgactttggaaatctgtggaagttaattgtgccccggacaacttcaccgtccatgtcgacaaacatgccaacgcccggttctgtctcctcggttccggtcacaagtagaaactcagaaggtgtcggagataccacgtgaggctggagacgctttccttgttttgttggcggaggtagaggtggtaagggcttcaagctgtcgttggtgggagacttattgtctgactctgggtcactagggggcttaggggagctctttccatctcgctcctcagagcttgatcttctgggttccccggtagatgtgaaaggatccggtgtccctgatggtgatctatctagctgggccgcttgtgcctgcggtgagagcatgcccacaaaggtattcatactattgcttctgccatgccccgaggcatcacttggtggagaagcagggtaggatgaagaaggtgaacgtttcagcggagtgcgcggcgctgggttcatgtcttccacatgccctgactcaaaaacctcattcgaggaggatattgggaagagcgggatcttctgttgatgcgccacttcgagtaatgagtatgaatgtgtatccgcagcacatgcgatcgttcctcgtcgcgctgcagtcaagcaaccaggaaactcgatcttcttgatccgtcgcgcctcatccccaatctgaaccagcatgattctgttctgcacagcaatcatgatagtcggattttcgccttcctctgcatcccagttgagatccaacccaccgatccagcggcagtgattgacctttgtggctccaaaggccgggctgagctccggcagcatgtagaacgtaacggtgccattgcagagaacacatgccttgtttactgaggacaagagaacgatttgtcgaacaccttcctgatcagtacccgctgggggactctgggcgaataggatcggtaatcgggatgccaatataaaggtaggttcggcggtttcgtctggggatgagggcgggagacatacgaagtgcaagatctcggctgcagatgtgccaatgtataggttttcatctgtacaagattagtcagctctggggccatccatggatggagcaggcaccgaaacagatagagcttactccagtattcaacacaggtgatgtagacgttgtcgctatgctcagtcgctaacggcacatccccgaagagggaatgtaacaaatacggcacagccactggtggactggtcttgcgccttttgcgtggaccaattccatcgtctgaacccatcatgagactgtagttctgagcatctccccgcaagcttggatcgtgacaatgggagggcggtcagtagctggggccaaagctcaggggcaactaatcgtatttgtcaggcagaagataaagcgatcgacgcgtgtgaagatgcaatcctagctttgtacacattagtattgaagctgattctctaggacctaaaagcttattcttaggctttagtttggtgctctctgtcttactaattttatttacaatctgaagctttaaatgcgatgctcaagtaggacataaaggcggtcatttaggcggtcaccaatctataagcggtcgttgtctcctgccatacattatactgttggaaacgggtgcctcgggttaactgcggtcgccttgaaacaatacactcattatatagtctccatgcttgaggtccctgggtgtcctctcaccttttgtatcacctttgtcataaatctgtattcaacaacgccaaccacagatcgtacgttgtacatacaaccggaacaatatcggcccgttcgccgcgtgtcctgttcctcgcgataacatatctccatctctccccttggtggactgccatttgatgtggggtgacagtgcagacccctggggttaggactgacaatggattcattcgccatcacagagagtttggtccctcaggaccaacatgacacccaacctgaatcacccatgtccagcaaattaaccgaagagaccaacaagttccaacgcgccatttcagcctggagaggtaattatcttcttatatgttgctgagtctttactgacatatctagggattgatttggccaacactattgcgaaactcgataccaccgctgcggacctcgttgaacaacagcgcgatgcactcgtgcaaagaaaggacctggcacagaagacgaaagcctacaagaagctagacgatgaatctaagctctcggaatataaaacactactgaagtcctatcagtcctttatcgatctcttgaccaaccaaggcaagacgtcatcgtcctcattcttacaactatactcttccttatccgaagctccggacccctacccactcctagaagcttctgtcgactcccttgtcctgtccgaagatacagttcccaaactgacctcagaacgggaccaattgcagaagtcggtggatcgtctcaccagacaacaagaggagaccgagaaacgcctacaggaggaacgtgctgcgcggaagaaactagaggaaaaccaggaatcaagagctcaggaaatcgaagcatcgtgggaagctgttttgacagaaaagacaaataactgggcggcaaaggagaagactttagaagagaaagtggaaaaccaggatcgattgatcaaggagctcaaagcaagctatgaggtttcccagcgcctaggtgagggtgggaatcaaggtgatgatagtgagggttcgcggagtggcgctactgcagctgagctcgagctggtttctgccgatttagagaaaacgagcttgagattggctgacgtggaagcacgcaatgaacaaatgcggttggagctggctcacgctgtatcacatgcatctggtccgatttctgttgaggacgaccccgattatctacgactccagtcagagaactcttcattgcttcgcaaactagatgctgcacgatttgacaaagactcagaacgacacacctgggaagctaaactgcttcaatcggagcgggcagcttctaaggcagcagtggaaagggaagagttgcgtgtgcggttagcaaaggtagccgactacgatgagatccggcgtgagctagagatgatcagatcgattgagttcgcagctggcgatgatgatgagccgggagacggtgctggtggtggttctgcggttgacgccaatggtgagggggccaaatccaaagacaagaattctctggagcaactccttatggcccggaacaagaaattgacggatgatctcaccgtcctgcgaatgtcgcaccgcgatatccacgggcagctcgaaacactacggaccgagctttcgacttcgaaggcagagctggagaagtcacgcaccctggcaactactcttgagaatgaccttcttcgtgtgcaagatgaggctgcaaatgctttcccatcctcggcgatgtctgttgcaggaacttatacctcaagatatccatcttctgcccgtcggggcgcgtcatcgcccacctcatccatcatctctggctttgaccagagtgcagtgtctgcaaacaccatggaatctatccgtgcaggagaagccgttggtggcggctctggcctcctacccatgatccaggcccaacgcgaccgcttcaagaagaagaatgctgagctcgaagaagagctatcaaagctatatgccactgtcaagtccctccgacaggaagttgcatcactccaaaaggacaacctgagtctctacgaaaagactcgctatgtctcgacctacagtcgtggccagggtgcctccacatctgcatcgtcgtttgcaaatactcccagctcaacttctatctatacctctgcagatacgccttcgggtctgtcccttgaccgataccaaaacgcctacgaggctcgaatctcaccgtttgctgcgttccggggccgtgaatccacgcgcgcatacaaacgcatgagcctaccagagcgtatcgtcttctctcttactcgagtcattcttgccaatcggacaagtcggaacttgttcgctggttactgctttgcactccatcttctactttttactgtgctctatatgatgagcacgacggatatcgagaaacatagcgctatgggcgccgccggtagcgccgctgctgctgcatacggtagtagcagcgggggtggagtgggcacgggtaatggcgggagtcagctgaaaggtgatgactggcagcaggaaggtttcaactaatattccaaggtttttttctggtgtttacacagcgaagagctccggagttccttttttacttttctatttttactctttctcttcatgacgatcatacgtcctggtgtctgggattaagtgtttctctgcgctgtactattctgggatgtgggtcgagagcggcatcgtgtgtaaatttgatttctggcaaatatcatgtgtctgagaccaatatagatggccgtagatttcgaatgtttccaaggggtgtgatgagcttaggtgtgtttaggtgtgtccgaagtagatccaagccctaatcacatcccttttgaggctatgtaaggagacttgtttggccctacttggcctctcgggtcggattggaattttcctaaaccccctcatatctatgtactctttctccttggagactcggtagtgttgttcacgcaatactacgggtgcatgtaggctttgtagctgacatacgatgtttggacggcattatgcttgagatatcaaaacattcttaagccctcgtcaatcccaattctgggtaatcatgcatgtcagttaggtacaaagatacctgtcagttcggacttcactcccgacgtcaatgtgatgcattagtgtcggagaattatggcctagcagatatatatatctcaccggtggcttgcccaagtcaaataaacacaggcaaaaatgccgacaggtaataaaagcaagtgtcatcggtcacataaatagatgcaagctgcgatcattacaaagggtctgagcaacttcatgtaagatggcgttatttagccgccggtgcgctgtaacttggaaagggaaaaaacaagacgggagaacggaagccaaccccgccatgtcagccaccacaatccagcattggaagacggattgtgaacaaattggctcgaaattaggactatagcatggttgaaaacatgaaaaagctctatttgataagtgccagggacccatgtagctaatgcctgcaatattttccccgagttctgcacaaatcgtaggattatggcctagcatcgatgcctctgcacactagcctatactggcaatgatctcgcacatctaacccaacacacatggcactgttcttcagtcagacttattaatagccccggggaatttatagcgctcaccacattggctcggttcgagctcctacaatcgaaccgccaagggaaaccccgttgttttgcttagcgcattgctatcatgatttagtcaaagtcgcttgcagtcgacgacaaatcagaagccaaagaggctgggagggtcagcactgggcgcatccatctaccaatgagaggccgtggtcgagctttaatccctgctagtacctgcaggttgcatcgatcactctgttaatagcacacagcattgtttcgagtcggacctgtgttactatctttgttatatgcttgaattgaaggatagttgcaattaccaccgcgtctatatgtatagctgcccctcggcccggccaatttatcatgtcaacccttcccttgtcatttcttctccaacacgcttacctcccttccttcatacttcatacccgacttgtatcaaaggcttgctgggcaatctttgattaatctcaaaaaagtcatcgccattgaccgtatatttatctgcctagcctgaacacataacagcaatgcgctttgcttccctcatcatctgcctggcagcagtttcgcttgctgccccaacaagcttccttgacgatgcatacaactggactgaggaaatggcagaattctacggaaaagtgagccagtacatcaacaccgcaaaacataacatcagagcaccgggggcttgcgatgtctctaagattgccctgccttcctatgcttcgggaatggccagcccgtcagggctaaagccaagatacgttgcactcggtcgaggcacgcaggtatgacaagctcctgagatactttattgagttacatcgctcattatagaactagaactacacatgtgcggactctacttccaactccacacccgcggctgtaggagctgtcgcaagactgtacaatgccacatgtattgcagccaactaccccgatctcctggcaaagctccccaaccttgcctacacggtttccctaccgaccaacgaagatgcctcgttccctcccgccaacctcgacttgatgggtcaccacttcttcactgatgtaacccccgagttcaacttgaacaccactcccaaaaagcagaatgggattgtcatggcaaagaagggaggtgcattagatgcaccctcaggttcagtgtcagggcagtacggtgctgtgccttggctctatctcacttctaccgatggcacggtgggcaactacaagagtgtctatcgagtcaacactgccgctggatcgtcaccaacgacctgcaagggtatgccactcgcattccaaatgcaatatgctgcggtctactacttttttggagagtaattgattgttttttgttatgtttgtatatacagaaggggactttggtcggaggattcgatttttctatatgtgaggcgggcgctatcttactttgctactattatttagttcatgaccgattatgagctggtgccaaggaattaattgttattcttcatcgatcgtactccgtagtgttccatctcacccactgcagggttaattcgacaggagcacattgcagacagaacttatattttggttggtccaatcacttcgttcaaacctacatgcttgaaataccaccactgaataatcagcgataactttgtctattttcaatcgcagctttgcatttcagacaatacagggcttaacggatcacgtgacatacacatggaggaatgctctcacgtgacgctctcacacggaggacacgctaaactggaaacaacctagcgccgttctgattttctgaaagatcccaaaggcgcaaaaaaaaatctcgaccgcatcaacgagcagcatcggtatcgatccgtatccgacagatagtcagcggccaattctgtttgaattgcttgatccaactatctctgatacgttgccaatttttttctccctctttatcgactctcggaacttttattccaattttcaactacactcggttcaagcactcggaaacgacagcttaacctccctctcctctgacttcttttataaccgagtcttttctcaacacacataaaatgtcttctttcgctcctcgtggacgtggtggatttggtggtgatcgcggcggtggccgtggtggtcgaggtttgttcagtccgatccatttgagcagcaagcattcaggtccaaaatctcgctggtgattctaccgcaccgatggccatggtcctgtttcttgttgcgatactatagttcacattgctgacttgttgaaggtggcttcggcgaccgtggtggccgtggaggtggccgtggtggcttcggtgatcgtggcggccgtggaggtggccgtggtggattcggtgaccgtggcggccgtggaggtggtcgcggtgcccctcgtggtggccgtggtgctcctcgtggtggccgtggtgctccccgcggtggtggtggtgctcgtggtggtgccaaggttgtcattgtaagtgttggaaattctcatggacatgggtatcagtcactaacgtaatcttttctcttgcgaataggagcctcaccgtcacgccggtatcttcgtcgctcgcggtggtaaggaagacatgcttgtgacgaaaaaccttacgcctggaactgctgtctacggcgagaagcgcatttccgtcgagggccccgcaactgaggatggtactgtcactaagaacgagtaccgtgtctggaaccccttccgttctaaggtaaatactcctccttatcctgggctaaagatgcatggtatccttggcgatttcatcgaatttttctcggaattcttcaatatcgccccgatagccatggctgccttattgtttagtccttcttttctaacgtcttctcccttttctagttggctgctggtgtgttgggtggtcttgatgatatctacatgaagcccggctccaaggttctttacatcggtgctgcctccggtacctccgtttctcacgtcgctgatattgtcggccccactggtaacgtctacgccgtcgagttctcccaccgctctggccgtgatctgatcggcatggccactcaccgtaccaacgtcatccccattgttgaggatgcccgtcaccctctccgttaccgtatgctcgtccccatggtcgatgtcatctttgccgatgttgcccagcccgatcaggcccgtattgtcggattgaacgcccacatgttcctcaaggatggaggtggtgtcattgtctccgtcaaggccaactgtattgacagcacagccaagcccgaggttgtgttcgctaaggaggtccagaagatgcgcgaggagaagattaagcccaaggagcagctgaccctcgagcctttcgagcgtgaccactgtatcgtcgctggtatctacaagcgtaccgcataaaggtcttaatctctggtctctggttatgtccattcccttttgatgttccctcggcgtctcgtgttctgtgatgtatcgaatgttttccacctttcttgtgacaggtatttccgcctatgtacttttggctgcgtcttaaaatttagttttccttttcgatgaattttacacgctggaatgtgtcatactgagtgtcttgatctgaggtgatgagatggttagcgtatgatatccgtacctaggtagctgcaagtggccaatacaagcgatttgagtcttgctaacatttcgccggcaacattggagcattcttgtagatatagctgccagttgttctacaagtgtctgtcgaccgatatagagcgtatctggcaaagactcagagcaattccaacaaagaagcagcacttcggtaattgctactagcatcgtctaggaatgaaaaaggtaggtcatcttcccaatggtgcattctcggacttgccccgggcctcccggtaatcggattgatgaccgaggcttgcaccgagaaaatgactcggaattgatgcgcgagaacttggactaatcgatcatattggggggatatgataatacgattggctgatggggaattactatgaccgaacgagcgtgggggagagacaagttccgcttcaaccccgcaaggtgtgttactatataatggcaacgcatgtaatttccgttctacatagttgaatatactgctattcattgcactgccctcttgctaatagccagacttaccggcatcgattgacccaattacccaaactaccttgtcttatacatatccatgatgtcgattctcatcaccggtgcggggggctatgtcggccaggaactagcggcttccctgcttgcaagcacaccagccacgacaaccgtgacaatcaccgatatcgttgagcccgagatcccagagtcggctgcacagtatgcaaaccgcctcaggtgcgtcaaggcggatctcacctccaccaaagaggtcgacgagctgatcagcgcatccaacccctacgagacagtctatatcctccatggtatcatgtctggcggctccgaggccaatttcgagctgggcatccgtgtcaacctcgacgcaacacggtacattctggaccggctacgcaagaccgtgcccggaacgaaggtggtcttcacttcatcactggcagtctacggccttgcaccaccaggattcgtcattgatgagacaaatttccctcctgtgccatcctcctcatatggatcgcagaaactcattattgagacactgctgaacgactactcgcgacgcggattcctggatggccggtgcgtgcgtctgcccacggtgaccgtgagagctggcaagcccactcaggctgccagtagcttcgccagtgatatcatccgcgagcccttccacggtaataaggctattttgccggtggccaaggagacggagatgtggatttgctcgccgcacactgtaatcaagaacttgattcatgcccgtgaggtacccaaggaggcatttggagattcaagagctgttaatcttcctgggctgaaggttagtatgcagcagatgttggatgccttgttggaagttggtggcaaggagcgtcgggatctcgtggaggagaagtatgacgctgccaccgacaagcttgtgcaaacatggactccacgatttgatactgctcgtgctttcgagttgggttttgcagcggatatttcgatggaggagaacatcagacagtttgcgagccggtttgtatgagctggaggcatgtagccaatcaatagacgcgaaattggatgaccgaaattgaaagatcggaaaaccaggcatatccggatacgttaggatcaggcaagccccatttgaacattataaagaacaaaaaagacaatatacaggccaatttagaccgtattctagcccacattatgaattaatgcagtgtaaggaagtattcgggatgtcaagggcggtttggaaaagcgggttatgtaattggctgagctgggcgaacaatttcagacttcggaacctcaacctcagggcgtctccatcagctcttttctccatctcttctcccttccccctccctccacccatacaagtcgctcccaatggcttctcggcgccttgctttcaacctaaaccaggctctccgcactcgtgcggccctgaagtccatccagcccgtgaagcgtggctttgcgtccccggttgcgttgccgtccaccacccagtccaccaccctctccaacggattcacggtacgaacatgcaattcatctcaatgatatcgcaatttagctaataatcttctagatcgccactgatcactcgccatgggcccaaacctcgacggtcggcgtgtggatcgatgccggtagccgggcagagactgacaagaccaacggaaccgcacacttccttgagcaccttgccttcaaggtccgaccctacaaaccccaaactacgaagcgcttttatctgataatatgactagggcaccaacaagcgctcccagcaccaattggagcttgagattgagaacatgggtgctcacctcaacgcctacacttcggtacgagccgggaaaccacccaccaacgtctaccgtacctaatactgatcgcgaatactatagagggaaaacactgtctactacgccaaggcctttaacaacgatgtccccaaggccgtcgacatcctcgccgatattcttcagaactccaagctcgaggctagtgccattgagcgtgagcgtgatgtgatcctgcgcgagcaggaggaggtcgacaaacagctcgaggaggttgtcttcgaccaccttcacgccactgcttaccaggcccagcccctcggccgcaccatcctcggccccaaggagaacatccagaccatcacccgggacaacctgaccgactacatcaagaccaactacactgctgaccgcatggtcctggtcggtgctggtggtatcccccacgagcagctcgtgagactcgctgaggaacacttcggtggcctccccagcaagccccctacctccgctgccctggccctcactgccgagcagaagcgcattcccgagttcatcggttccgaggtccgtctccgtgacgacaccatcccctccgcccacatcgctctcgccgtcgagggtgttagctggaaggatgatgactacttcaccgctctggtcacccaggccatcgtcggtaactgggaccgtgccatgggccagtcgcccttcctcggcagcaagctcagctcccacgtcagccaccacaacctggctaacagcttcatgagcttctccaccagctacagcgacaccgggtaagttttgtttcctgttgatcatctatgtatattcttgatcaaaaacatgctgacttagtattagtctctggggtatctaccttgtcagcgagaacctcactcagctcgatgacctgatccacttcactctccgcgagtggtctcgtctgtgcaacaacgtcagctccgctgaggttgagcgtgccaaggcccagcttaaggcttccatcctcctgtctctcgatggcactaccgccgtcgctgaggatatcggccgccagattatcaccactggccgccgtctgagcgccgaggacattgagcgtactgtcagccagatcaccgagaaggacgtcatggacttcgctacccgtaagttgtgggatcaggatctcgccatgagcgctgtcggcagcatcgagggtatcctcgactaccagcgtatccgcgcagacatgtcccgcatgatctcgtaaagttgttctagagtatgatcgcgtgtgaagatagctgctgaatactccaggaaaactgggtttttggcggctttgatttgaatgtactatcaatcattgccttgggctgttagatcccaaattcgtgtgtgaaatagcaattaatggtttgccatagtagactatatagtttgctgcttttgcagcaagcataccaattatctcctttgtttgttctatttcttccagtgcactgtgaggttttttttctttctctgcgtagtatcaccaccatcgtagttgcctctatcgccgagtctctggaaatggtcgtcgttgcacccaagtcctcgtgtttcctacatctcacagttctttgcatttgagtttacccttcttcgcttactctatgccagcctggtcagaacttcaaaccacaagtacctatctggatactttactttgacgattggcatctctgctgactgggttcaattcttgagctcttgtaagttttctcgctatcttcacttggtcatcatttctcaccactgctgtttccttctaaccgacatcgatattttagtgactgaacctctctcatcatggcgcgattctctacccttccagccgagttgcgcgagctgatttgggagtttgcccttccagcgcgagtcgttgagattggagaaccatgcgacccagatatcttaccagaggaagacctcagacgagcatgggtccttaacagaaagtatccaaccattgctcatgtctgtttggaatcacgccgaatcgctctggccaaattcaagctccccaaaggtgttgctcttgcgcaggattgcatgacagatgatcgatggtggtggaagtcgaccgacattattcacttcaatgctccagagattgtcgcaccaacgcaaagatgcatactagaagacaacctattggacttgataagtgttcctattctatgcaaaaaggtctctatcagtgcagacatcgttcacccttttttgcgtttccgtactaggtccgagatcccacactcgatagtatgggaagtgctttcctcaatggagacatgcataatagccctacacacagtctgtatccgagccaccaacgaacaagctcaggagctaggcctctttggcaacggagacgagccagcacagttgattgacccgtttgacaaggcagctatcaggcgattcagacagctctggatggacacaaaacaggaggtctcttcagtcaagttttttgatacaatcgacaccggaagattcacttttcgagtcgaaaggtggctcgcagagatgtcagcggagtacatcgacttcaaatcgaccgatccaccgttcccaaccctaggaccgcgggctataagtgcagcacttcgtcgattcccagctcaaagacacaattccgacgcgaaacaatatcttgtcggatttcccaatctgcatctgaggatcatgtttcgactctgcccacctgcagtggtcgatccggtgattacataaccatcccgcatttgatcgggagattttttgaaggcgattttgtttgaagttcactttcctataactcttaccacatcataacaatgggaaaacgtggcggcaaaaaggtaatcttatctttcagacgttttatatgagacgtttgttgtactgactgtgtctcctttcttacagggtggtagaggccgcggcggtggcggcggcgcaggccgtacgcgcgctcaatggcaagatattaccagacagaacgagaggttcgaacgctactacaatgaacccgagttcattccggaggaggaaaaggaggccttctgggctaccatgcgcaaggatcttcccaacagcttccgtttcactggttctcgagggtaagtcaccactaggcttttttttgcgacgcgccccgggaggtttcaagtaatattgactgttgtttactttcattagacacgcgctggctgtgcagcagagtcttaaggaccgttacattcctgaaatcacttctatcaaatacgaggacgaattcgtcgagcccccgcgcccagtttcgtggtacccagatcagctcgcttggtccatgaccactcctaagaatgtcatccgccgattcgcaccttttgcttcgttccagaagttccttgtcgccgagaccgacgtcggaaatatcagtcgccaggaggttgttagcatgattcctcctctcctcatcgacgctagacctggaatgactgtattggatatgtgcgctgcgccgggcagcaagtctgcgcagctcatggagctgcttcatgcaggtgaggaagatgcgattgcgcaagttactgaacagatcaagaacggcactgctggacctgaacccatcggccccgaaggattgaacgacgatggccgaagcaccggtcttctgattgccaacgacagcgactacaagcgcgctcacatgcttatccaccagatgaagcgcctgagctcgcccaatctaatagtaaccaaccacgatgccacactgttcccatccatcaagctgcctcctctgcccactgccgatggcagcaaaccccaaaacagatatttgaagtttgaccgcatcctggcagatgttccttgctctggcgatggtaccgcacgcaagaacgtcggtgtctggaaggactggacccctggcaatgctctgggactttacagcacgcaatctcgaatcctggttcgcgccctgcaaatgctgaaggtcggtggacgggtcgtctactcaacctgcagtctgaaccccgtggaaaacgaggctgtcattgctactgcaattgaacgctgcggtggcgctgccaacgttaagatcattgattgcagccaggagctgcccggcctcaagagagcttcaggtctgcgaaactggaaagtgatggaccgagagggccgcatgtggaacaactggcaggagatcgaggagcaccgagaccaggagggcatcaatggtcttgccagacttgcagagggcatgttcgccccaacaggcgaagctgccaacctgccgcttgaccgatgcatgcgtgtctacccccaccagcaggatactggaggtttcttcatcacagttcttgagaagacctccgaaatcaaggccaagccggagagcaccaacgttatccccaagggttctattgcagctctcgccgcggaacttgattctaggaagaacgaggtaaatggacagcctctggagaaactcgagtcgctggatgaattagtcactcccgatgaagaggtagaggaagaactcgcaaagaatacctctgttgctgaggccgttcaccaactcccgtactctgctaccctcgatgcatccacccctgcttctcccgtgaaacgggctgcaggtgaccttgaagcagaaattcctgccaagaggagtagactagacgatggcacggaagtcatgctcggtgaccggcccgtccacgccccagcgcatggagtgagaactggccttgacactcctgataacagcacaccttctacctccgcgcctaccgcacagtctttcaagaagaagggtccccgtcaagaggagccgttcaagtaccttgatcctaatcacgaggagcttgttcctatctatgaattctacaagttgtcggatcgattcccccgtgaccgtttcatggtccgcaatgccgaaggtctcccaacccgcacagtttactacaccagtgccttgggacgggacattctcacctgcaatgaaggccatggcatgaagttcgtccactgcggtgtgaagatgttcgttaagcaggatgcacagcgtgagaacgtctgcagatggcgtgttcagaccgatggcctgaaaatcatcgagccgtggctgggccctgaacggtccgtcgttctgaccaaaagggagactctgcgtcgtctcctcgtggagatgttccccaaggtcaccgacgatggctggaagtctctgggcgagattggcgagcaagtgaaggatatccccatggggtgcagcattcttcgcgtccaagcgaacgtcggagaggatggtcttccgtgagttttcccctttcacattcctttgagtgatatttgcgtcttactaacatgaactatagtgaggccatggttctgccattgtggcgatccctctattctttgaaccttatgcttcccaaggaagagcgccgcgccatgttgctgcgtatcttcaatgactccacccctctgatcaacaccacacagaggcagggtgtcaagaccgagccgaccgagccgactgctgaggccgaggacattgcactgaaggaagagaatctcgaggttggacaggaagcgcaggacgaagtggatgatcgtgagacatacaccaaggatggcgatgaggaggatcgcttcaacaccaccgtgtaaatggttttatttttttcctcctaatgcggagatctctttgccgtatcaaaaagccaatatcatgaattccccttaggttcgttcacccttggtagtttcctaagtgagctgcatcattaggaatctcatacaacgtgcaccggctaaattcaggcctccacaacttccccgcaggaaaattgcttacttttaattccgagttgattaaaatctcctgccatttgatatgtggaaaaaatagacccccgcaatgcaacacggagcatccggggacccctcaatttgtctggggtaatgacgaaaggtctggcttgggaaaggggtcattgctatagtagtacagcaatcgcatattcccttgattcgtgtcagacatgtctcgagcctccgtgctatatgaatggcgcaacccctgcattgcaaggaaattggacctgagtccaagtgcttcctctcctctctgtccctagcacaccgcttcacccttgtgtgaattgtcacgaccgccatgaagctctcgtcttcttgggccattgcctgtctggcagcccaggccgctggtgctgctattacccattcgctaaatggctttagtatcaccgagcacccggatcccgttaagcgggatttgctccagaaatacgtatgttgggttggtccttggattaggatgattgtgttgacaagcaaattgtataggtcacttgggatgacaagtctctctttgtcaatggcgagagaatcatgctatttagtggtgaaatccacccatatcggtaagctggaaggcatcaatgagccctttcaagaaagaatcatgctaaccaagattcctgcagtctgcctgttccatctttgtggattgatgtgttccaaaaggttaaggctctaggatttaactgcgtttcattctatatcgactgggctctgctggaaggtaagccgggtcagtatactgctgatggaatatttgctctggagccattcttcgacgccgccaaagaggctggcatctatcttctggcccgtcctggtccctacatcaatgctgaagcatcgggtggtggtttcccgggatggcttcagcgcgtgaatggaactctacgaactagtgatgaggcctacctggaggcaacggacaagtatgtgatcctttcgaaacgtaagacttaaagcacggtgaatactgacatagataattagctacattgccaatgttgccgcaaccatcgcgaagggtcaaatcaccaatggaggacctgtcattctttaccaacccgagaacgagtacagtggcgcttgctgtggatacgacgggtttccagacggtgcctatatgcaatacgtggaggatcaggctcggaatgctggaattgtcgtgcctcttattagcaacgatgcctcagctggtggccacaatgcccctggaactggcgaaggggctgtggatatctatggccacgacagctaccctctcggctttgactgcgcaaacccttctacttggccagcgggtaatctgcccacttatttctataccacacacatggaccagagcccttcgaccccattctctctagttgaggtaagatatatggatatctcctgtgtggactatcaatctaactggagtttagtttcaaggtggtgcctttgatccctggggaggtgttgggttcacgaaatgtgctgctctcctgaaccatgagttcgagagagtgttttataagaacaatctcagcttccgagttgcattcctcaacctatacatggtatgttccggctctcatatcataatcaccattctaatctctcaccggtagatctttggtggtacgaattggggaaatctgggccaccccggtggatacacatcctatgattatggttctccgattactgaatctcgaaacatcacccgggagaagtacagcgagctgaagctgattggtaactttgtcaaagtctcaccggcctaccttctctcaacaccaggagacttgaccacttccaagtacacaacctcgtctgatatagccgtgactcctctgctaggagacgacaacacggcttcgtccttcttcatcgttcgacactccgactactcgagccaagggtccgtcgactataagctcaaggttcctactagtgccggtgaagtgaccattccccagcttggcgggagcctcactctcagcggccgtgattccaagattcatgtcgttaactatgatgtggcgggcaccaacatcctctactcctctgctgaggtgtttacctggacggggtctggtaagtccaagattcttgtcttgtacagcggccccggcgagcatcacgagctggctgtctcttcccagtcgaaggcttcggttattgaaggctcgtcgtcgaacatcaccattaagcaggtgggtaaggcggttgttatcggttgggacgtctcagtcactcgccgtattgtgcaagtgggtgatctgaagataattcttctgggtaagtgctttctccgataccgctctgcttcatcgcaactgactaaactactagatcggaactctgcctacaactactgggtccctcagctcccaaccaagggaacacgccctggttatagttcccaagaggcagccgcctcgtctctcatcgtcaaggctggttacctcgtgcggactgcttatctgcagggcaatgaccttcatctcactgctgatttcaacgccacgaccccgattgaggtaattggcgctccgaccaatgccaagaacctgattatcaacgggaagaaagcgcaggtcaagatcgacaagaacggaatctggtccagcagcgtcgtctataccgcaccgaagatcgagcttcctattctgaagaggctaaagtggaagtctattgatactctacccgagattcaagactcttacgatgattccacatgggttccagcaaacaaacccaccaaaaatagcgtccatgaactcaagactcctatctcgctactctcctctgactacggattccacaccggaaccctcctcttccggggccacttcgtcgcaaccggtaacgagaaaactttcttcgtgcagactcaagggggtagcgcattcggcagctcagtatggttgaacgagaaccacctaggatcatggggtggaatatccattgacagcgaccacaacagaacctacacactaccaactctaaagaagggcaagtcgtacgtgttcaccgtagtcgtggacaacatgggcctagacgaaaattggatcatcggcgaagaggaaatgaagaaccctcgcggtatcctgaactacgacctgtccggtcgctccgctagtgacatcagctggaagctgaccggaaacctgggtggcgaggactacctggacaaagtacgcggcccactcaacgagggaggcctatacgccgagcgccagggattccaccagacccagccgccgacccagagctggatatccgacagccccttcgacggcctgtctgcccctggaatcaagttttacagtgcaaacttcgatttgaacatcgagaagggctgggatgttcctctgtactttaacttcgggaacaccacctcctcgcccgcggcttaccgtgtccagctctatgtcaacgggtaccagtacgccaagtatgtgaacaatatcggtcctcagacgagcttccctgttcccgagggtattctcaactaccagggtaccaactatttggctttgagtctgtgggtgcttgagtcggatggtgctaagttggagagtctggacttgattcatactactcctgtgctgacggcgctgaaggttgagtcggtggatcagcctaagtataagaagcgtcaagcggcttattaggtatctaatgccaagtaagtaaataatgcagagtatacaatacaaagagtatgagccaaaaacaaaaagaaaccgcaatattattgttcgaggtcacgtgacttttatgtacagtacgctcccaacgatcattagtcccagctgtagatagtttctcttgtcctcttcacgcaatctgatattttccagagcatttacattcttcatgtagctctctcgtctctatatccgacatttatctacaatataatgaatagatcagactatcatccaaaatatctgaagtatcaaaagtactccgtagggcttccagggtcatctccacttctccgcagatcccagccaccccagcccagcctctgcccagcctccctcttctacttttggtgtgacatttttgtgcttttctaacatccttcaacattatacggagtattctcaataaaacccactcctctgacaccgcatatgccatcaaactccacaagcgcgcattagctcacaagctgacctcaaatcacccactcgctcgaatcaagatacccaagccctcgtgcctctcgaaatctacgcactctcacatttccaaaattaaagaccaaacgaccaggcatcatgtcgtccctccctctcgacaccttcgacctagacccgacaaaacccaacctcaacgcaagggacctgaacgccaaccttctccacaccgacacctccctccaaaaacgctacacaacaatctcgatcccatcaacatacggccgactacaaacaagcccggccgccggcacagtagtgggaatcatactaggaagcgtagcaggcttcgtactgctaatgtacgtactcttcctcgcggtgaacccggggggcattgcacggggcggcgtagccgcgccaacctcatcctcgatatcgatgtcgatgtcgatggacgaagaagaggtcgtggaggtgcgcaagcggcgcggctcatccgctggacggcgccgacgcgacatcatcgaggtcgaggaaagagagggcttccgcgatagttatcggcgtcgtccgacgtcgagacatgatcgtgtcgttgtagaggagtctctggctacttctactactggggaggatgttattgaggttgaggaagaggagtcttcggtgccttctgatatttcgccgcgtccgccgcggagatctaggaggagtgggattaggcatgttgatcctatggcttatggtgggggtagtgattatagtaaccatcggtgattcggggtgtgctctggaggtttgggatgcgatataccatttttgcttatattctatgttttatgtcttatgattgattcttcgaatgagttttagggtctccaaattatggctaacgcatgatgtcttcgagacgagccttggtgaaagacagaagatgacccacaatgatttagcggcccctgcagtatataaagaatgaatggcgttgtctatcaaattatattgctaataggataacaggatctacttgctgtccgaagtatcagtggccgtccacttgtacttggcccccgggtgatcgctgctcagcctgccatccgagaaatgaggtccaagataattctctcgtgttgttcgtccttcggccgcgactggatcccagaagacgcctcgcgatttgagctcggggatcagatacttgactacgtcctctagatctcccggcccgactgcatatgatatattaaagccgtcaacatcagtctcggaaatccacctctcgagtatatcagcaactgttttagcagagccgatagcacgggggtgtggtccaccaagtgcaagctcctgcgcaactcggtgctttgtccatttaatgccatcgctgccggggatcgtagccctccaactagagacgatactttgaatggccccgggtccactgaactcgaagttatcatcatctgcgtactttcccagatctgcgcctgtccagcctccaaatagtgcgagcgatccatccaggtcggcataagacaaatattcatcatacttctgttgggcacgctcatcggtttcgtcgacaatgataagaatgcctacgatcagcttcagcccgttcaaatcccggccctgttccaatgcgctccgtcgaacatcttggacattctttcggacagaatctatatgcattccaggaagaaacatagtttctgcgtgtttggtcgcaaatgccatacccgctttgctcgcccctgcctggaaaatgaagggagtccgctgcctggagggctcgacaagatgcggaccagcaaccttgaagtgtttcctatagctgatatcaataccgcataggaattcagttgaatttaagggactcacccttcgtggttgatacgccgaacccggtcagggtgcgtatatgtcttcaagtcgcggtcgagaataacggcgtcgtcccgccaagacccttcaaggagcttgtagacaacctcgagaaactcgtctgcgatctggtatcgctcatcatggctgatttgctgttccatacccaggttttttgctgcactctcgagatagcttgtaacaacattccacgctacacggccgttggtcaggtggtccagggttgagtatcgccgggcaagcaagaacggcgattcataggtagtagatgctgtgatgccaaacgagagcgacttggtgacagccgccatagcagcaatgggggcgctaggttgcgataagtgaattggttcatagaagtagcaaaaagttttaggaacctacgatgggtcagagattggaaattgggcagcacctggaagcacctctcggatgtttcccggaccattatagacatcgtaaatgcccagcatatctgcgaggaaaagcccatggaaattgccgtcgaggattttcgccaactcgatccagtacgcgatttccttgtaccggtgagtttggtttttcgggtgcctccatagccctatattgaaagtgttggccatttgaagagttgggctagtatagtacttttaattacctggagcgacatgagtcgggctgctcatggaaaaggcgttgaggatccatttcttgggttctgaggccatcttcggcgtggaattggatgaattgatgcaggagctgttagtacgcactgtcgaacgccctgaacatttaactttattggcccttgctgtgttaaataggtccttatcctgatagaaatggctgctgtgacgtgattcagccaagttatgacactactatgggggcattagggcttgacattgcggaatggcacatactatctaattaatgttagattcgtttctcaaagaggatttgacagactaaatccatggatagataccagatctgattgctcatgtacgggtatctggcacaagttgctgtgacgtgatttggctaagttatggctctacgatggggaaatcagggtctgatgttgcgagatttcaccggcacgcggtgtacaccagcaagctgtgcactcaaaatacatagtagccgtcctactgcctcaataatacctttcctagaaaacataagaattaggtatcttttatatagcacgctcatataaaaggtacatgcacgtagacctcattctctcaatcctccgactagtcagaggaagaacacggatattaaaataatgaaggctggtctaattaatttgctagaaaatattaatatatcccacgtggagacttgaagaccatatttggaaacactatataagagatgtatgtacctagagatagttacttaatgcactgatactgaacaaaatagacttcttttacactgtacataccaatagactttccctaagtatgcccaggaccgagaagtccctataatgcataatgtctgtatacccgtatggccaagccttatggggatgccatgtggaaatttctgctttgtgggacccctaaactgtacctgggaaagatatggggacgacggtagggcggctaaatgctacatccatacctcaacgaccatgttttacctctcgaggtccttatttgtcgatggtcgtcgataaggtttatttgcactatatatttcaatcttgaagaaagaagaagactatttcatcaatctaaggattaccgacacttacattattactaaaagctagaaatgtacatagcgcaatcgcaaagccatatatgttttcaaaaactcactggagaggcgagatatcacttataagtataatgctataaggagaattctatatgcaccaccgtcactaagatataaagatatcatttatcgcatttactatgtgcatcggactgcagctcgcttatgtgcgcagatcgacgtcaaagactggatttgattgcttgtgcatctggcgcaagattggtcgttgtgacgtgatccagccaaggtatggcactatgataagggaattaggcgttggcattatggattggcacatacctaactagggcttttggagtcgattccccaaaagattcgctgtactaaatactggatctgattcctcatgtaggattggtagatttgatactccactatgactcttgtgccttcaggtatgagctcttagagactatatatgacgaaatcgcgcggaatttcgtatcggagatagctttcagcacattggaaccactcagaattctcaaatcattgatactaagcggaacgatcaaccgagtgaggaaagcgtctaaccgatggaagaggccgaggctagagctttgcgccatagatctagtatgaaaggttttcaggtgctggcggggacataaagcaggtaaaagtctcggtagctgcacgtctaggaaagtgcaattcttcccgtgcatgatttttcgcctgtcagatttgacaccatgagtgagaccgcaagtccagtgccgcccctatcccagggagtcgggtatggagttgtcattggattgggagtcgctttcgctataggtaattcgctcagccctacaagcagcctgtgaattgccagtaacattgttcccgccaggcatggtattcaccacaagagcattgaagaaagtgttcggtgaagacagtaacacaacagagacgtaaggaaccaggcacctagttgtgaaatccagctaactccagtagcttcatggttgcaaaccgaagcgtcggaacaggattgactgcgtccgcggttatctcgtcctggaccttcacttccgctcttctaggcgcaccatacctcacctactggcacggaattgctctgccaatctggtgggccaacggacagagtgttatgatctgctgctttgcctacatggcaatccaggccaagctcaaggcgccaaatgcgcacaccctcctcgagctcatacgcgtacgctatggtcgtgctgcacatatcatatggatcataatggctcttctcaacaacatcttcaatttcacgtccatgctggtaggagcatcaactgcagtttccgccctgactggcatgaacgtatacgcctgcacatacctgttgccgctaggtgtcgtcgtgtatacatactggggtggactgagggctacatttttgacagactatatccacacattcatcatcatgattatcctggtgtggttcaccctcaaagttcttaccgtcgctgaaatcggttcactcactgcattctacgatctggtcaagtctcttccgcaggaagggacagtcgccggcaaccatgcgggatcatatctatcaatgaacagcaacgagtctttgttcttcggcattatccatatcgtcaccaacttcggaattgtattcatggatacgggcttctggcagaagggattctctgcagatattgcagccgcagttcccggatatatcatcggtggaaatgcctacttcgcgatcccgttcacttttggcacggttgttggtcttggtatgtgtcctcataattaacccgtgtcaatatctaacctccctttaggagccctcgtcttggaacagacccccatatggccgacctaccctcgcagaatgacccaggctgaggtctctggggggttggtactgccctatacggcgcaggcagttgctggaaagggaggtgccgcggcaattctgttgattctgtttatggcgtgcaccagtgtcgcatccgctcagctcattgccgtcagctcaattgtctcatttgacatttacgggtcgtacttcaataaaaaccccacggaccagcagttgatccgatggtcgcatgtgggcgtcgtcggatgcgcactgttcatttcgacctttgctaccgtgctccataagggtggagtcgacctcaactggactatatatatgattggcatcgttatttggtatttctcaattaccccaagagaactatattctcactaacagaccttatagccccggaacctttccaacatgctttgcgcttctctggaagaaacaatcccgcgtcgccgccattgtggcgcccatcgtgggtatggcttctggatttgccatctggttcgcgactgcctataagctgtatggggagatcagtatcattacgacgggcgagactctgccttgcatgtatgcatgtctcacgtcgatgtttgtcccgcttccagtatcagtggtattgtcttacctgcggccctcagactttgactgggacgagttcctcaaaatcgaaagaatcagcgataaaagtgattcacagccgcaatttgaccgtgagagttatttcagtccggaacgagtgaagtatatgaagcgcatgtcaaaaattgccgccatctgggccgtggcaacattcatgggccagatcgttctctggcctctgcccatgtacggcgcaaagacagtgatgtccaaggggctgtttgtggcctggttggttgtgggcctgatctggctgttcatcacgctgcttgttgccaacttttatcctcttgtcgacggtggattgcagcagatctggcaggtcatcgctgtagttagaaagaccactaaagatgactcgtccgaggtcattgaggtggatgtcatcccggagacgaagtcgtaactcacatagaatacgggctggaactggttgggccctaatcctcatcattagcacagatcactcgatttatatctacgacatggtcataagcaacgaaattaactgctaccaactggcaaatgttaaacaaaatttattacaggaatcggaagcttctattaaaatataacaaacgctttagctatgttagtaaatacatctcttaccggacaataggctagatatataatgtatctggtaaagtacacttcgacctgtattgctcaatactattgtaaaaagaaaaaaaatgccaacgatgtaactagttgttagttaactagagcctatgctatgacaaactcaagttggtcgatccactccttgaaggaaattgtgccgtgtctttcgttgtaacacctggaagaataaagaagacgaattttttgtcgatcgtggaaagggtcgacgaccgttatttttgctcgttggtaagccatggctctgatgttcatgttttgtaacctagagtgatcacgtagatatgcaaccacctctcgacagatccgcagactttcgtctttatgctctctttctagaggtttcgagatcctgaaatcacttgtccgggtgaggctgtcgagagtcaaatgtttcagggtgtgtagggctgtttgtagcatatgcctgaaggatacagtggttatgacttagctcagtgagaggaccgatagacgagaaaacttgaactgttgtgagatccagtcgaggtgtgcgtccgtcaggtcaaggccggctttctgtcggcagaacaaagagggatttatacctgcgagatgcatggtgagatccagactctctaagctcggggctgcctgaacaaagagcggcagcagtctcttcttctctctttcggggagatttttcctttcttgccagaccactgattcctgtagcaggaacgccacttcttctttgtcttcgcgtaagtgttgccgctcactatcttgggtatgggctgaggaaatgcgaacagacaagtgctgcagccgttgaagaattggcgtcaaggcttcttcttccgctggtgtgaggtctagttcatcatccaccatcatcccaccagaagtttcaagcctttcgatccgagtgtgggttgtaccgagggtggctaacagtgtggaaaaaacataggactgaaaaagactcccccgaaaggaactactacgagcacacttgtcagcaccccgggttagggagctaggataaaccagattgaagccaagttgtgtccgcaaacttcctatccctctcatgatcctgggaaatctcttagtttcgtcctcctgatgaccgtgatagtttctcagtcctgccatacgcagattggaaaaagaaggcaggcagctctctagtgcatctcgaaggggcgtttttgtggtgcttccctctagagatgacaaaagaatgttgaagtggtcgactactgcatccttgtagatgagataacgactttctaacggtacgtcacacattaaggcaagcagattattctaatattgttggccgccttaccggctgccttgcaggaagaaggaggggggaatcgtgaaggaaggaggagagttggagagaagtcgtagccgttgtccctgaagttccagagtttcctacgattgaatgagtcgcttaatatcctcaagtgcccacgtgtagtccgcacaaaaaatggtcggtacaatccacattgtctagcctcaagaatcagtttatattcgacgcattgcatggcaagaggtatgaatacacataccgtaacatatctgctgaagatttcgtggccagccacgtaccttaacgctcgtagaccatcgcttgtaagtgtaatgtagatttaaccaaagatcaaattagcaaggtagtggtaggttcccagtgcaaatgcactgcaacccagtcgtagtgcacaaacgtccttgatcttcagttttcgacatatttaggcccataactctggaggtagagaattcatagaaatttccatcatttggggaatctgacgttgaagataaaggcaaaaaaaagaatagtactgagaagttgggaaactactggtatgcgttttgggcgcctggcaggattataacgaaaaacgaatacctgtttctacgaacaggtaccggcgcaccaattaatccgccatactaataacgaatttttctcgttatgaactttgttgatcattcatcccatacaaaattcgttataactgttacgatcctatatatagtgagtgtcctgtgtcctagtgtatagcggccgacagtcggatgcctagttttaatggttttatagcctaatgaggactagctcttactagttttagactggcaggaaattaaaatgcctgaattactatgacagatctcctagtaagcagagtactaaaggccttccgatagctacagtacagtactacttcgtagactggcaaatgatttagccaaactgatctatatggcgttgtggtctgtgagtctgaatctttcctcaatgccggttatgccgtcaccgagtgtgccggttgaccatagcaaaaactaagcatctgttctattttacgtctgacacataatcccatttgcataaaggtgttggtaggactgtgagagtaccctgcagagaaacatgcatataagactttggttccaccttgtttaggtatttcaagactgcaagaagcgacatatgactcttacacggacaattcccttgtcgtcagtgctaatttgtcaaaaaatgccctccatcatgataagccatcttcatcttccgcaaacaaatttctaaattgttctaatctccaaaatggaaactcgccttccaaggctgtgcagatatcccattctaaagattgaatagtactgatcactcaacagcatcccgattgaagatacaacatgataaatcttcggctagtaagccatctgttctccaaataacctagctcttcttaaccaaataaagatgccatgcggccttccaggagacgtaaagctcgccatcaaagccgttcatcaaacatacaaatccggcatatggtcgcgtgcgagtcgtatctacccgatctataaactttcttttacggttatcttcgaaatttccttatatatagcgactgaaaatgaaaatgaagaattaggtagaacatcataaaccagctcgagggaaaagtaaacaaaaagtagtgtaaaaaatcattgtagtacaattgaggcccaaaccccaggaccaggacccaagaacgccatgtcctgttgtgcgccagcgataagtaataagagtcaaggatatatacaagggagcaaaaaaacgatcacaccctgagaccaatttccaacccaggattcacaaagcaccagttcccgagtcaaatgccaatcccaggaaactccaatatctatctctcgatggttctctcaggagtatcgtgtttgcgcgactggaaaagacactccaacaccagccaaaaaccaaagcgtagtcacgtattaaaaaacaaggccaaaatgaggcctagaacaacatatccaagcagcagcagcaagccattgcagccatgatacccgcgcaaatgccacctgcaccaccgccggagttcccgcggtcattggcatagtaaccctgtggcggctgttgagggtactgctgcggcgggtaatacatcggctgctggccttgggcgtaatagccctgcgggttttgctgtggctgggcatagccttgctggggtgggtagtagccctgctgtggttgctggccgccgccgtagtagtcgttcgcagcgccggggctttgatgcggttgttggtagtaggggcctgagtcgtggacctgggcagggtaggaaggtggcgggcttgtctagaagggatttatatttagcatttgtgttttaagcaggcttgcgattgattgttcttgtacttacgggtttgttgtaagacatggctgaagccgaatgtggagttcccgggatgtcagacttagtgcggatttggggagattgcgcagtagatgtggatttgggggctgtttctctgtcggattggttcggtgtatactcgaaacccgcgaacagtaaggaaagagtggtgatagaaataaagagtaggaagtgccggaatcgaggaagagttgcagtggcgcagttcggggattagtcaaccgatttccagggttttccacgttccaagactttatacttacgcggcctcattttcgtaccccgtggatatacctaccagaacaataatgcataaatctattttttgggtgttttcctttataatttttagttgatatgatagaaatgattagttacaaaatatggattgcaggaaacagagatgtctttttatagtcttatatatagccagaaggatacatagtaattggctatagatgtcggcaaaatacagacgactttgccatatatagtatatggaatatcgcgtagacagtagcctatatgaatgtgagcagacattaagcatgatctacaacttccttctcacctgaactcggaagacagccattcatagattggattcatctagagatacaaagacacgggccattatgttaaatcacaggcaaacaccccatcgaaatcccctgaagcaggagaaagttcgcgcctatacgccatgctgcccataatacaaaggggagaccaaaaactttttttgtgtttgttgaatgtgagtcaatgagtaaaaaaagtaactcccaggtgtccacttctgtctggcatcggctgctctctcgactgccagttgggtatttcctgcagagttgcgagtatggaaaaaggtcatatcggagacagtaagtggacctgatgcgattcgaatttgcgaggttgaggttcacaggaaccggggtttggttttgcaaaatccccaaatgaaagaaaagagaaagaagagaaagatctagcgtgagctcatgctgaagaggcgcatatcaatcctgtcccatttgcagcaaccttgttttgcagcttaaatgacccagcggtaactggcatagcgacctgcagtctcagacttgcgaatgatcttaacgacctggccacggcgcaacccaagatagcgggcaacaggatccgagatctgtatgcggggcaattgagactccttcagacggtagcgctcgagaagcttgcccttctcctcggggctaagcaggacgtgcttggggactagctcgtggcgggtgatgttgacgagcagatcttgttcctggaagtgttcgcagatgcggccggggacgccggaaagcaggcgcacggcagagggtgagataggcgtctgcgtgatgaagataccagtgtggaagttgttctcatcgacaaggtggttgaaggcgcgcacttgcttggttccgacacctgaggagtcggggcagaagtcgacgtaaattgtgccgcagtctggctgggggtttgggtttgctttgctgggaagtggtgtgtacttcatcttcatggtatcggtggggcgggcttggattttcatcttggtgcgactattgttgcggaactattagtgatatgtgccttttcaatgacgtgtgccggcattgactagctcaaatttccactatctcaagacaatggggcggtggacgcagggattcacgtactcggggtagcccagagggtcagcatattttgcgcggaagtcttctagcgggagtaccagctcgttatcagatacttcgtagccctggtgtgtcgccgatggttagccttgggtaaacgggcattataggagagacactgagaagtcagggactcgatctggggtacctacccggtcagcgagcagttcatagactgttctaaatgtgcgccagagccgagtcatctcgcgctcggcttccatggagtgtgccgaatccccatccatgatggagtgagaagttgacgactaggagagaaaaggtaatcaagtactatctcgcctggagggtttaaaaagaaaaaatttggatagaaagagctccggtggagagataaaggtgaagtcgaaaaatcggcgggaactttctgccagcgacgcttaagcggagaaaccgaccgaaccattttaattattccaagtttccccttttcagtttcgctttagtctgttggtctatataatcccttcaggatcctcggaaggcaatttgtctcttccttctctctgtctctctttttacattcaattcgtcgcaatggctgccactgatgcggagcgggttaagcccaccaagcccgacgaggccgcctacaagaccagtctcgctgaggccgagaaggagcacactgctgctcaggagaaattggtatggaagcctgtttctggaattgtcacttgagctctcatctgactctgggtcgcgggggtgattccgacccactattgttgattgtcctcgtgtccattatttacttgcataccatctcctcgggccaatgactgatatgcgcaatagaaccaaatcaaggccaagttggataatgccaagcccagcaaccaggattcgcccatcgtgaagaagcagcaggagctgcgcgccgaactctcagccattcgtcagaagcagtcgggcttcaagtccagccggtcctccatccaggagaagctcaacgccttggacgccaatctcaaggcccgcattactgagcagaacaactctcgcgggcggctctcattcaagagcgtcgatgagatcgacaaggagattgcccgccttgagaagcaggtcgactctggtaccctccgcctggtggatgagcgcaaggctctcaccgaggtctccaacttgcgcaagcagcgcaagagcttcgccggattggacgaggcgcagaagggcatcaacgatatcaagacacagatctccgaactgcgcaagaccctcgacaaccccgaggccaaggccctgagcgacaagtacaacgagatccagaaggagctcgataccatcaaggccgagcaggattccgttttcaagaacctgaacgctttgcgcgatgagcgcaccaagctgcgcaacgagcaacaggaaaagtacactgctattcgcactatcaaggatacttacttcaaggcccgccgtgcctacaaggagtacgaggacgaggcctggcgtatacgccgtgagcgtcagaaggctgagcacgaggcctttgcgcgcgagaagcgcaagaagatcgccgataagaagttggaggaggcctcgcagcttgcctacaccgacgagatcctcactgcacagggtctgatccgtcacttcgatcccgcttatgatttcaccaccctgggtctggatgagaagaaggatgagggcagcaatttccgtgccggagttggccgcactgttgaggccgccgagatcaagggaatgaaggttgtgcgcaaggacgacgaggaggactactttatcggttccggtggtaagaagggcaagaagggcggcaagaagggtggtgccgccgccagtgctgagaacaccaagttcaacatgaatgttggtatcattgaggatttcgccaaggtcaagatcgacccccctatgaaccagtcggatgtcgccgcctccgtggagaagctggctgctaagatcaccgagtggaagaagaaccaggctagcaagacagaagaggtaattattatttccaaggttgtcggttgtgagcagttgctaattaccccgcagaacatcaaaaaggcccaggaagagattacccgcctggaagaggaggagactaaggccaacgcccctcagaccaatggccgggccaccgacgctgccaagaagcccgcccaagacaacatcactccatcagcggaggctgagctggctcaggagaaggatgccgtggccgacgttgaggaggagctcaagaaggctgcgatcgaggaaaaggcatagattcgaggaggaaattatccgtacatgctcaatgcgtcaacttatacatgaagtctagcgtttgtctagcattctcactgcgctttttctttatttttattttttcgtttggctcttgcatatgcattatatctacgattcataagtggacagctggttgtttccaaaaattcatataatcgaagccttttatttcatctagcctaggagataagcccagtcatactctgatcagagttgtacattatcatgtgatatgatattgaattaacttccaaatacttgtcagtcgtatctgtcgtgaatgtatgtaaatgtaggtagtatgtagttatgtatgggtacattattcgcaagactccaaagagaaagagtgccagttatgtccaagccgttggaagtatccaacggatgtcgggagataacaccaacaccaacgctaataatcgcatgagggggaataaaaagagaacaggaagcagtaagcagaaggtatagagggggtacgagatgtgtacatagtctcccaaaccccaaaagaagagactccagtcaaatattgcatgtacaggagacaacaagcctcagccgaaaatgtccagaaaaagaaaaaaagaaaaggaaaacagccgtcacatcatgtcacatcacatcacatcaatattggaagtagttaccgatcatttcgcgataacaaccccccaacatcatgaagctcgacatcagtgtcaagcgtggaatccgaagaaccgggcatcgcaaccgaccgattcccaaaagccgaggcgggaaacggcaggtccgccggcccaggaagcggcgagcgatgcccgaagatagcacgcgacggactgaagatccccaaatcctctaaaaaggcacggctgccgccgcctcgccggcgctgcacaggctccacgggcgaggacaagcacgtctgggcgcgcacatgctccggcccagactccggcagggctcttgtcagcaaaccgccgacatcggagaacgacacgcggcgcggcgtgtctgagggcacgctttggcgcggggactggtttgtgcgcaggtactcgtgcggcgagactttgcgctcgagactgtctgttgtcgaggcgtggtcgtcgtccgagcgacgggttgtcgtgaacgaccatgctggatcgagggcgccggttcgtgcggctggtggggtgatgggcgctggtctggggagacgagttgtgtctggggtgtcggggattgtgtagatgtctgggtctagacggatgcagaggccggttgcgagctcggagtctgagccccattggttttgcatgacggtgtttctgcggaggaaggatttgtccatgctttctgagacggaggctgagccttgggcgcgcttgtatttgagtttcttgacgccgcggtcgcggacgaaggagcctatgacgaggacgttggcgactgctgttgcggcgagaatttcgagggaggcgagaagggaacggtatgattgggcgccgtcattgtcaattacagaagagacgcggtaggaggttacggcgaccaatatcagagataggcagaataggctggatagggtgagtctgcgctttagaggcatttgcgccatgaggattattgggattgggatagccacgaggaggaggtcggtcagcacgtcgcaggaacccattgttattaggttcacgtagccggcgcggcaggttgggcccggatctgggacgacctgcccgtagtgnnnnnnnnnnnnnnnnnnnnnnnnnnnnnnnnnnnnnnnnnnnnnnnnnnnnnnnnnnnnnnnnnnnnnnnnnnnnnnnnnnnnnnnnnnnnnnnnnnnnnnnnnnnnnnnnnnnnnnnnnnnnnnnnnnnnnnnnnnnnnnnnnnnnnnnnnnnnnnnnnnnnnnnnnnnnnnnnnnnnnnnnnnnnnnnnagccggcgcggcgggttgggcccggatctgggacgccctgccagtagtggtagaaaggctggcattcggccagggttgcgatgaccacggctattagggttgagacaaggaagtaggagatgaagcggaggaagaaagttgtcgatcggcgccaggcaagccctgtgactcgctttagaaattcgcacatggtcactttggtcgtccagatgctatagtcgtggttgtgagtcattttgaactaatccaaggtgaagacaagggtgtcttacaagacggcgtagaagatacgcgcagcaagaaccagcttactgcccagctctcgattcgcgatctccttctctgtcaagccgatggtggtggtattgttggtccccaagatgagaacgaaatgcacgaggaccatgcgaatcagcaagggaatgacgctgatcatcatgaccttgtcctcggtgaaaaagcgctcgacgcgaatataacgaccacataggcgcacgacgatgatcaccaaggagaatatggtagcccaccagctcatcatgagcgtcggattgatctcagatctgctctgtatggccggcagattctcggaataaatgccacgcgcgactagcgacatggcgctggaggccatggaggccatgatgcgaaaacagcagtctcgcagaaagcgattcagaatgtgcttttacattgctcgcacgtgggaaagtgtggggatgttttagctggttatggggcgaattgcggagactagggatggaaagtgacgatcttgagatggaagagagatgttctcaggtacgatataacggtcgagggagataggggcaattaataataagtcgccaaaccttgtcgactcaaggccaagtggaagaggggaaatatcaaggatgacaagataagcgaagcctccgtataaacagccagtgaggttcgactggctaatctgggagattcatactttttcaacgacctgatagatctgggtgaatacatcgaacaaagaatagaataatcctctttagcatgacattgttgaccctggcatacaatattcctccaatgagggcgatctgctatagttacggtgtacacgtggacgattaccactttgatagatgcagtcctacgttgcatcgacagggtataaaaggcacaatgtccccgataagcgaggagctctggagagttcgccctggacttctgtattccacggaatctcacgattatctacctccggccctgctccgtcggggaatgttatctcccaaaaccttacctctaaattaatcgcgcaaccctcatccaaccacagcggacgccgaatcttcccgctttgcttcatcgcgaaccgactcgattcccgacccagcacgcagcccacccaatacggtccgcaactcctgtaggaacttggtaacctccgcctccgtaccgacggtgatacggagacagccctcacacccaagctctttcccacggaagcggaccactacaccacgcttctccgccatagcctcgtaagccgcaagcgcagtcacgttactcggtcggccctcggcgtccaggatctccacgagcaagaagttcgcatcgctaccgccaaggaattgccccacaccggggatcgccggtagttcgcggagcaaacgatcgcgttgagcgatgatctgcgagcggaaactgtgcatcactgccatatttggccctgtgagtgccgcggaggcgagcgcgcttgtcgggctggagatgttataaggcgctttgaggctgttgagcagacgtgcgacctccgggctggcgtaggccacgccgaggcggataccagccagaccgaatgccttgctgagagtctgcatgacgactaggttgggccattcggtcacccactctgccaagctggagccttcgggcgcaaagtcaatgtatgcctcgtcgaccaccacgataccattccaggtcgggtgttcgagtaccttacggatgtcctctttgcggatcaggttcgcggtcggattgcccggcgagcagatgtaggccagcttgattgatgggtcggctgatagggcctcgttgactttatcggcttgtagatggaacccgtttgtagcatctagtggtaccttgacgatctcgaggtcgtttacctgtgcgctaacgctgtacattccgtaggtcgggggacatgtgaggatcttgtctttgccgggaacgcagaagcagcgtagtagtgcgtcaattgcttcgtctgagccaacgccgcagaacatgtgctcggggaggagggtcttcggggtgtggtggtgggtattgcggaggttgcagaagagctgcttcaactcaatctggtgactggtgacacatattgttagccaaattggtctgaatgagattcgacagtagaatttcactcacggatcggggtaacggttcaggccgagaaagtcaatctccggattgaaggctcccgtggcattgccagcctgggaggactgcaattctcccttgctgctcagggcaagaccaggcccgaaggcattctcgttggcgtcgaggaggacgttcgtcccatcatctttgtagtcactgactcatttagctcaccgataccggtaatttggaaagggcagcatactctctggcgcatcggtagggctgcaatgccaggatattaggccgggcgcatgtggccaaattaaacggagattttgaagccattgtggtgaccttgggaggagtgtgagacgttgagcaaaagttggtggggtgctcaggtgggtggttttatcggaactctatgagtcaaatgccgatctatgcgtgtatatcttccaaggttcttatgagattccacatttacatatctttacaagtccaatggtattacagacattacggttctactacaatgtcttctgaatatattttcactgctgagaacacaacgcggggtaggtgcttttgttggtttcagcatgtttgggggaaaagatattcatatgaactatatctttaattctttttaggtgacaagaggtggtcagtcagtgaaacagacattggtcaatgcccttcgagatcctacaggataggacatggtatgagaactcggtataacaacagtgcatgtaaacaattaccaagctactctttctctcagcagcaaggctctgaagcaagaagcaagcagcgttaggcgcatgaagatacaatcaagcaataagtattgtcgttctgccattcaagtctttctgaaaattcgcttccacaaccgcttattaccaccctggccgggctgaggttggccctgcgttttcacctggggttttcccaccactggcagtaaaaagaaagcctccaccatctggatgacacaagccgggttattgtcatactgtttctttttgaaatcctcgacaaagccttgtctctctctcgcagtatagttgaagcctcgttcccttgaacaacaatcacacgttggcgtacagtgtccaatgcctttgtttctttctgttctttcgtggcgatcatgacagcatccacagtctcgactacaacagccacctctcttcatgcaattttcgactagttctttccggagataccaagttgtatcttttcgtaggtatcatacgaccgtttgatgggccaataggaagcattatttcggcaaggtaaagcttgtactcggcctcgctatattgccgtagtagaattgtaagctcctgattataatattgtgctgctttatctccatatttgtcggctgctatcttttctataacccgaactttgcgctttagggatttttcttgttggacgatttctcggagacgatattcggctattattatatccacaaagacggcgatattgaaagatcgggtgccataatggagtatgcgtagttgttcttttccatgagctggggcttttgcgtagtgtgcgtcaggcaccaaccttgtctcttcaaacatattgcgagcaccctgcctgatcatgctgacagtttcgaaaagtcaaggagtaaggagaagaagactggaaaagaaagagaatatggcatataaacggacgcccagatgaatacatagtatccggatgacaagagccgctcccaaatcgggtctagcccaaagcctaatcggtacatacctcggaacatccatcaggtaggcgagcagcttccaacgctatagaggggaaatctggaaagaagacctccacaaaaatatgagaaggccgcataagtgaacgatcatgtccgattctttcagatctttaatgatcaatctatgattacataagcatgatctccggccccggggccgaggtcggccctgcctccaagataggcaattttgagacctcaactgggtgaaggaagtcaaaaaaacaaatgtgctcaagaaatcaagcgtccaatttttttatctcaccttgctccttttagcacatttataccaacgcctacaagctagacacccaattgcttattccgcacatttccgattttatcagctcaaatcaaaattcctctcactgggttttatgcaggtcctttgatattggtggctctagcgttcgtaatgaacgaaatggccctaaaaggaccgtcaattttaccggtggatatcatggaatctcaattgtccacgattgacctcctaatggcgatgttcccgtccccgggcgagctggaaatccccgaatccacaacgcagtgtgttgagaaactccgcgactggtgcgagaatccgaccttcacacctcccagaattccctcaagcctctctctcaccgtctgcctaccaattgcagacggagacagaacaatacaagtcaacatttccgtgccactgcaatgtgataatccagagacactggaccaatcaccgtcattgggctattcacttcgacaaccagaatggatgtccagagccgaagttgctggacttactgcctcaataccgcaaggcgatgatgctctagaggcattcgaatatatccaggcagaagccagccgctttcttgaaagcaagcagtctcagaccgtggccccagaagacacatacagggggccaactgtccgagtctggttctattttccatccctgtcaacccgtaaaaagagggatgacatggtcaacctcgcgccgggatatgctctgacaggctttgtgctggcgggcaagccgggcgtattgtgtcttgagggtgcttcgcctgatatcgactcttatatgagtttcatcaagacacattcctggggtgatatccctagctatcagaaaaaagtcagtgagaggtttcgagagacagaaggtgtccagagagtgttttcggggatggaggaaattacggactcgctcggagagcgaggtggtcagcgggccaatcggggtgatatgcaagcactggaggcgtggttggggagtagaggactacaagaagcatttgaaaaagtcatattctaatatattccattgaacaggtctgtttcaataatctcaaccgagatttcatcattactgtggcgtagtagcagctggttgatatcttttgcagcttgataccacaattttgtctggcgttggtttggtattctgagagagaaaggaagtgcaggtgggggagtaaggtcatacctacctgaggcaaacaacggtctcaaaaataaagaatgagaggatgaagaatagcaggagcacaaatcagcattgataaagtacaaccagtttgaggagcggtctcatacttacctaattgggagagagatacctagaccataataaaaaccaaggttccgggccatattcggtcattcattgttcattgtccattgtttaccctaaacatttgtaacccaccgaacgatttctcaactcatcaactaacatccatttgtccattttgcttttaatataccctcgtctaatcgaaatgccccctgacttctccacattgaggcatcgtgagcgccaacgggccgcagcctacttacaggctcgcagtgaagtcattgccgctatcgacgcgatttataagcgggtcgaaatctacagctctgcccaaatcaaccccacctcctacaagtctcttggtattgattaccgattgcttgagctagatgatgatgggaaacatcttcagcccccaaactccgatctctccaccccgattttcttcgagcctcgaggtgcaacgtgggtggcccctgttcgtattactgatgtcgaatgtgagggcgatctaagggcaatcaccgacggatgggagaacgtcaaagacaacccactagtccagagctttcatgcccaggtctggtatgtctatttgggtttggagcggatgtttttccagttccgccgagagttctaccctgaaggagatagcagagttccacctaaccttaggcaaatatccaaatggctgaagaggtaagaaatctaccgcctttgcgatacgattgggatactaactcacgttcgctttatagtggaactattgtaccatctgtttttgccgaaagattttactcggctatctggggatcaatgcgatgggcaccggcatctgcctttgtgccgaagaaactgttatatcctggaaaaccgcatactctaatcattattttgattcaagaagaacccagcgaagagctatctcgcgcagaaatgatgacccttaccgcagccatgatcacgcgtcttgagggagaggaatgtttagaatataacactattcctgtgagtatggatttaagatctatatacttatctttcatgcaagctaatatatgttaacaacataggttatggctatcacgatttttggaagaatgaaagctcgagtactcgaagcccattctagccagcaagagctagtcgtcaagaagacccagcttcttgatttctcgacaaaccaagtcgctaacaagagcatgaatattctgcttggatttatggctggtgacctggtcggagatcctagaggacccacagttcctacggatatttcaaaggtttgtgctccagatataatcgacttgggaagcacgctgacaatgaagtagacttcacgaacagccgagaaggtaaacaccgcgaaaggaggaaccattcggaagatgttccgcaaaatgcgcccacgagtcgtggcaggtacagagccagagccatcggagggagctacccagtaaccaaacttccaatggagccttttattacgctgcaacggtgacaggggattaatatctacatctggtcctaagtcacgcggcaagaaccaaagacaccttggctattcctaaactcagtcgctagttcacatatcaataagtctttacttggaattgaattgatttgctcaaagtctcttacaccatctgtaagaataagatagaaagtgaagaatataatcacgacagttggtttttatttcgcgaagtagacgacaagcaaggctgagtggcttcaggctactggcatgacaatgaggatggctgcgagaacaaccctaccgaactcatgcatatcattgactgaccctgtgtcgaagggaccgaatgttctcatgacgaggaatgcgtcagtgttttgtccattgctcaaacactcttcgtatcctttatcgaagggcacgaacgtgatgaaaagctcatgtcggtcttgtgaaatcaataggaagctagaagataggcgtcattggttattcaagctctttgaagccacttattggacgtcgaatatccaaagactgttagacttactgctcgttgaagtgggccatctgcccgtggcagctcatcgaccaccccgcgacttcacatgcctcttgcgtaaggatagcgtcggtgtttacttggcgcattctcctctttacttctacgatggcgaagataccaatcgtattctttgaccgtaatgcgccatccgtatacgcggtagacttggtctggtggaattgactcccgaagtgcacgcggttaatcacccactctagctttgagtggacaagttgagagatactttgaagaaggatgatggcggcggcattcggtattgcctcgtcctcggcatcaggaagttggcccatttgcatatcgtcacgaataccgtggacagttatcgtttgctcttgtaatcttcttgcggtagagaaagaccctggccacatagtactagtctccccgatatcgtcgattgaatcatttgtatcgaggagatgcatgtatcgggaccattcagccgaggcagcgaggatacccgcagctgtgtctaaagcttcagtggtgaacccaaattggtggtatttgtcattgaaagacgcgacagggtatattgggcgcgagtacgagcggatcatcgcagattggacctcggtggcctccgaggcggacgcaatccagtcggctgggatggtatggatagtttcatttctcaagccggctttgtggctgacaaggtcattccaatcctcctcgtctgctgggatatagaaatcatcgatttttgcgagttgacgagcagttggctgtttctgggcttgagccatcgttctaagtcctcgcaaaggtccaatcagtaagacacacgaaagggggggggtctgggattaacagaaatggcctcataatagtgagctacaatacctgaccagaagtagaatgcagaagaatttcgagagatttatgatcggtgatgagtgatgggtgggttgtaaaaaagtacagatgagcttggctaggaattatattgcggtgcctcggtgatgaaagcctaatttaactgctgtgggtgtacgaggggtatggtctacttgataggaggggatgccagctgagtaacttctgttacgatcaagggtcgttggttccttccccgtaggaatcgtgccttcctaaggcggaagcgagcgtaccgggttttgcatgatttgcaagggaagggcatagaataatgatttattttaagcggcatacggcagctagctgagcaacgagatgaggaatcagtactccgaggcttcaaagtagggcaaggccagcgaaatatctgggattgttaaagggacccccctttgaccaatgcgacccccccggcctattttttgtgattcggcttaccgccttccacaccgccttagtgtcgaactccctagcaagacggtagatacctacaatttgtatataaaccactaacaaaactaagtcacgtttatcacatcagctacttcatcgtcaacaactactgcaacaactactccaaagaccgctctatcatcataaatagattcaaggatataggcatgagataaaatacacgtttttttctgatcaaaacgtaaggtttttttgactatgtaaaaccagaattcaaaagtgcagaattaagtctggcaaaattgaattgatgcttgattagtaagacaaaatactgaaaagtcaggcagacgggtcgggcgaattagaaagaagaaaaaaaataaaaaaataaattgaatctgtatagtttagacaaatgaaaggctctatgtagtccgtatgtatcgggtccaataaaaattccctgctgatgcacagataccagatacatcattgatgattttgatatatgggtcacaaaaatccacaacgcctccatatgccacatgtctgcaacttagggcttttggtcaaatatactcgagtcgcctattctgcctttgtctccttcggctccaatgtcttcggtgcttcggcgggctttttcaccacagcggggggttcgggtgctgaaggggctgccatctgagagtgcttgtgcttctcgcgtttctccataaggtaagtccaactcttactaaggcctgccgtgaacggtgccttgatcgtctggacagtacttggccagcggattgtcttctcaatggtcttggagacctcctcctgaagatcatcatctccagcaatccgtcgctcaaacgaaccgccttcaggccggcgaagaacctcgtccgaatccttgctctcctgcatcaacttattgaaatcggcccgggggatgccaaagcgagactggtactggaagtacaacttttgccggaaagcttcaggcagacgacgaaccatgttaccacgcatcacggggtccatatcttgcgccatggctaagatggcgttcgggtcatcgatccaatcctcgttgctgcagcgggggtcctggaaagtgacattgggcaaattttcgatgagcggtgcgtaaagccggcggaagttcgccatttgtcctgaaacaatctttcgcaccttgccggggtcctcggcggggaggctcatgcgtagatctcccatgtagctcatacctgcgattgtggtatataactcgaattcactgaatctctctggcagtaatagcagtgcaacacgcaaagcagacagcaagttcatttggttggccaatcgcaccttcgggtggtcacgcaagatcttgacgggcttctgcagacgaccggcgagatacatggtgtcccactgggtgaggtctcgacataacgtatctaggttcaccacaccatatttgatcattgtcccgttcacggtgatataaggatggaagtagacacccgcgccaaagcggtcctgtacctgagagaccacgtacgaccccagcgagcctaatgcagaataatgatcacgatgctggtgtagattgatatcatgccaatgctgggagtatgacactccgaaaatgaagtcaatcatcttcccggagcccttttgcatattttggatggccgagggtgccgaggggtgcagtgagctggatggcaccccgctgccagtctgcggaaagacacccgatccataggcaaatgcgtagcgaattggtgctctgaactgccaaaggatcattcgcaatgcctccttgaaatcttggtttatgaccatatgctggttgactccgaagtccttagagggaagttccgagaaattggtaattgacaagttcggattttcgtcccagttctcgggtaacagcagagaggatgacgtcgagaagtaggaggaggatgagttgttggtaaacaccttgcatagcagatgcgaagagctggtatttgccgagggccggccattgtagggggtaattggattgcaattgaatgacaggaagcgagtcgaagaaggaacaatacgtcgggaggagcgaagggtgcggcgaagggtgcgagggcgccagagagagctggggttagctcctcgggaagcaaccatctaacagataagttgtagcgggatcatcgggtacggtaggggatcagacatactgttactcccggcatgattagggttgaggcgaaaggaatcgaggggtgtagcgcaattaataaagtcaagtcaacgagcccgcatataaagcaaatgagtgagtgaattgaagtgaaatgaatttggacgccccccgtcaacatttccggctctgacgtactccccgtccctctccgcttctaattcgggtgctgagtcatggtcacgtggacgcgtgtcgaaggatgcataacaaccaaaagtaaacagacgcggaggatcaacaaccacgactctttcgacaaattcgcctacttccccgacgaagggttgctttaaatgttgagcattagtactaattgtatctgacctccctgatatctcgccatgggctctgaaatggatacctttgcggcccgcctagccagcttcgatttagtgctgaagccggagaaacgcagatcttccggcacaaaaacacccaaagcgattacatggccgcaccagcgaccttcaccagctgaggtatgtcattcttcgaagagattacacgcgccgtttaagatgattgacttggcgggattatagttggcacacgctggattctactacaaaccatacgagacaaatcccgacaacacaacatgtttccagtgccaccgggcgctggatggctgggaggaggacgacaatcccatcacagagcatctcaagcatgcgcccgactgcggatgggccatcatgatggacctccaacagagtagctccaaccccgcctcgattgaagaccctacgggcgaccgaattacgcaagcgagactggcaacatttggtacagtgtggcctcatgacgggaaaaagggctgggtatgccagtcggagaaggtaaatcgtgacttcaccgtattcatattattttggctcacaacaatgacagatggtagaaggcggatggtatttctgccctacagacgagagcaatgacctggccagttgtgtctattgcaagttgtctttggacggttgggagcccaaagacgacccattgtgagtatccatcgctctttcttagttggacgattgctgacttaccccagtgacgaacactatcgccgctcctcggattgttcattctttgtcttcgcccagccaccaggaaagaagagcaaatccgctcgtgctaagaaacctcgggtttccaaggcatcctcccggctctcaacccagtccgttggttcagttgcatccgaagcgcccgatatggaagtagatgacccgatgggccaaagcatcatgtcccaatccagcacaaaatccaaatctacgaagaaggcaccgaagagcaaatcaaaggggaccaagactaagaaggaagaaccagcggaggtggaaagccaaattgacgccgaaattgaagaagtcgcccaaacagagcctgtcaaacctaaacgtgcaggcaaaggaaagaagaggaccagtgaggatatcaaggatgaaccaaacccagttgccatggaggaaaaagagccatcgcagccgccagcagaacctccagcgaagagacgcgacacaaaaacacgcagcagcagcattactcgcagctacaattatgaacacagtgactctgcaatggcagacgcaaggccggtggatgaagctacttcggaagaagaaaccacgagaggtcgcaagcccacgagaaagagagcgtccaagacccgcaaggtctccgatgttcctgttgcatcaaaagccccgtcaaaggcgcgagctcctcgtgactccgagatcgaagcggaaatcgaagcaggcctcgaagctgatatccccacacctgccgaacccgagcctgagatcgaggctgagccagcagagccacgggcgtcgaagaagacaaaatcgagcaaaaagtccaaggctgtggctagaattcccgaagcgaccgtgcataatcaagtagaagatgtcagtgatcgcgaggaccgttcagatccccacgtggaaccggttgatgatgaaccggaggcgccagccccaaagaccaagctggcaaaaggatctaagaagaaggggacaaagaaaaccaagaccgaggagacgataaaagcacagtcgccagagcctcgagaatccttagggctcaggggtcccgatgttcgggatgattccgagcgtcatgactccttcgtctccgtcgagattattagcaaggagccggagaatgcaccggagcccgaagaaccaatcgccaaggctgaatcgaagaagatttccaagaagaaggatggcacatcaacgaaagagaagaagtccaagaaatccgagaaaaaggcggagcaagctcctgttcttcaaccctcagtcgaagaacatcgcgccgaaccgtcagtcgaggaacaagacgatgaattcgagactacagacgatttgcctgaccagcttgagatagtcaacccttcccctccacaacaaatatctcccgagccacaatctcatattaagacacccagtctaccgccaaagactgccaaacggtatagcgatatcccacacgaagagcatcttgcggagaccttagtccaaagccagatctcccctcacgaagtgcatgagcctcgacggaattcaaaccgctctaaccgggccgtttcaccacttcctccagcccaccaaaacactccctcgccgtcaccccagtcatcagatgcagaaaaccggccgccatcgcggccctcagcatcccgtgcaccagtccaaccaacacccaagcaacctgagttccgagtccccctggcagttagtaccccatcgccatctaagcgcaacgccaatggtggattcggaccttctggccatccatggacaccggtggatattgatgaagtgctgtttggagaggctagcgagaaggaaaacgcagatttatccggactgttcagaggcgcgaaagccagcttgactagcccagagaagaaaatgacagtccaagaatggatcgcgtggaacgcaaagaatggcgaagaacgactgaagcgagaatgcgagcgacttgtcagccaattcgagaaggaaggtggccgagcaatgcgacggctcgaagctatcgagtgcatcgactaatcaacaggtacgctatgtttttggatgatatgatttgcatgttaggcgttatgctgggtgttggggaacccttgttagatctttagctcgcaatttgaattttgaaagtgccattattgcacatgaagaacatgatcagtaaaacaaagcctgggaaatatgccaaaacaccatgggtatcaagaatagaatgcgcgcccgagaacaacactcaacaaatgatccccaaccggccctcccagctatcatcctccttcttaaccttctccttcttccgcttctcagtgcgcttgcgcctcttctcctccctctctttggcatcaatctcctcccgctccttgagccgcacccccagatcaagctgccaagccttgcgctcttcctcgtccctctgacgcttccgatgcgaaagcatcctcaatcgcaagcgcacgtcctcaacattcgccctcttcacctcgccactctgccccgtcgcaatcagatgctgcttgctgttcaagtgctccacaagctgcaagttatccttgtaggtaagatcacagtccttgcagtaaaatccagcgccgaggccgcgtttgcccatccccgagcctgcgggcacaatcatcgtcttgcccaccatggacgcgacgtccaggcgctgattgcgggctgtggtatcctcgagcgagctgtagtcgactggtgcgtggtatttcttgcccagtagcttcgcttcgtagcgggctttgccttcggctttgcgctttgcttcatcgtcggcggcttttttggcgtattcttcgcggtcccaggttttgcgaaaggccgtgtccgacaccggggtgccgtaggagtttggtcctgacatctctgtggttgatgtgggtatttgttttggggagatgtagtggaggttggtgagtggcggatctttaaaagttgaaggtcggtttgaggccgatatggaatattacataagcgatcctaattgggcaggtgaggttggaacagaagtacttaagtggctcaacacacagcttgtctttgttccaagtgttccaaggctgtttattatattaagatgtcctagcataaagaaatagttattatctacaacttgtgcttattaaatacgataatatgtaggatgtaggtaagtaggaggatcttatcatcacccattcaatcatatgagactatatatacatccatggcctcttggaggctgaaaataggcagctgttttggaataatcaagtaccatttgatgattgcatcggggtaaatagctccaactagtaatcagtgtcggtggattcactttcaggcagcagttttcgacccgcatgtataagatgaacaatatcaccacgtcgaatgtacacaattgagccgcaaagaactcggaaaatatccaaaaacatggagacatcccaacacccttgttctcagcccaccagcgctaacctaatgactctcccctcggaactccatatccaaataagcacctacctttcctatccggacgccctagccctcaaacacagcaaccgtcacttctactcctcagtcttcacaggtgtacgcctgaaagttgcctggctcgtcgagcgatttaagtgtggactcgaatgccccatggagaagtgctcgttcagtactgacgagtctttttgcaatgggcgtgtacgcggcattatggaacgccgtcggtggcatcttgagtgtcgtcaggttgggaatggttgtctgcttgtcaatggccagacttgcccgccgcattcggtgcccgcttggttcaaagttagggcacaggcaaaaaggagagttgtcaaggcagtagagagctggggacatgaaggtttgttccctctttggttctatcttattcctgtctgataaagacatgagctgatattgtgttgcatagcctttgtgattggcattatggctgttctgctgaacttattgtggcattttgcccagaggtgagacattgtcttatgcttccttgcgtgtggtttgaagacatcgttaattgaactcatcagaaattggtacctcgatagcagattgagaggacattatacgactactcattgagtgatgattcaactgagttcgggtgtcaattgacgatcagccacgaattggtgtatagacgaaccatcggtcgccataagaaacaaatcgccaagcaatctagcaacacgctcacaaaagatcgctacacaaaagcgtcttcagcatcttcaataagcatgatgatgtaatggagcttcgcagaatattcgatgcggagaatcgagttagaccctgacggtaatgcatcatcaggagacacatcaggagacatattctcacagacaaagctgtggagacataatctctgaaagcaagcttcctagatggtgtgatgcgttgactacctcatcttgcggggaatcctagccctaatccggatcttatcggtgacgtcatgttgacgactacgcataatccctacatgtatataagttctctcgcctctatgttcatcaccaacaatctctactttcctccaccctttcattattcgaacataaaacgatatgtctactacaggtgccaccatcaacaccacgacgggtaaccaccccgtggacccctacaagacccagagcttagaagacccgcctctccctcagaagatcgaagagctggttaaatttatctccgatgttaaatttggcatgttgacaaccaagcagtcagagggtgactatttggcttcacgatgtatggcactagccgcaacggtatgagcagagccacagataaccacaattcaagggcaatcatgctaatccattacccaaaataggagcacggcggcgttgacctcattttccacacaaacctcttctccggcaagacaatggatcttactgtacacccaaaagagacaaatatgtccttcctcgaccctatcagcggagcctgggcctccatctccggtactgcatcagtgatcggtgatcccgaaatcgtgaagaagcactactcgcccggactcagagcatggattggcgatatgggcgatggtgtgcacgatggcggaccctcagatccccggattggcgtcattaagctcgaggctaagttagtcacgcatgttgttccccacaggggcctgcttgggcgtgcctatgaaaatattaagggtgccgtggagggtaccgttcctaatgtcaacggcattcgagagatgagtttggaggaattggccgagtgtatgtttcctttctctcctttttcatctttgaatatgtgccacggacatgctaactggtctctgtagggcgcgtgacgcatcaggaataagtgtatattactatgaaaaaggagtacgcctttttggttaggaaggtatataacgttttgaatggaaataaaaatgaatatatttgaatgcatatgcccctcccctaaacggtctttctgcttcgtattgttcactgtaaccagtctatatcgactgagatctaatctgaagacgtgggtaaaaagccgacttttataagttactcggcgctcttgctgacctcgtagcccggaggtacgcaagagcccttccgatgctcgggtacgagttccaattttgttttcagcccagccagccacattggtccgtaccgggacacggccagaacatcatcaccgtcacagactgtaagctttagtgtcaaccaaacgtgaccaaacctattcggcagcatcaccgcaccggagcacccatgtgtacggctaagcgagtgaccatctaatacaagcagaataactatccactttgcagctataaacggtgctgcggcgtctatgctgttggcgctgctgtttctggtttaatgcttcaatgaaaactgaacagtggaaatatgggactcccgttctgggcacataggatgaatctgatattcaacaggtcccttgaaggcaagataaagaggggaagcttccaagctcaggtaggatgttatattattctattactagccgtggtaatatcattcagccaggggggaaaggccagctgacatgcaaataagagactaaatattccaccagggcataagtctctcattgggtatgctcaacggcagacatacctcaagtactccgtggtctagcggagattgtgccgtagccctcttgctgatatcagaacaaacaaacattatggcatcacaccgaagaatgacggttgtgaaacaagtcggccggaaataagagacgtcgttcctgttctcatcatcacgttaccatttacagatttaattaagcgagcctatgtcgttgtttgtctcatttgtgaatagtggcagaagcctacctcccttaggataactataagaagatgaccctgcccccagaacttcttcttttctttcttcttcagctctctttgcctctggcttagatcaagtgtagtatctgttctattcagtttaatcgctgaatggtctgcattgcagaacgtcatgattattccaatatttagacctcgcgacttggcctctgtgcttgcacatgcttcgttgcacagtgtcattgggcttacactaccctcgatcgacgcgaacgccttttcatcaactgttcggcttgtccgggcgcttggagaagatctctgttcgtctttgtccagtggttccatttattcaccgccttcttgaagcctgaaaatactggctggcaatattaaccaatgtaagagttctgccgcaattgcatacccgtacaaagtagtacctagtaggtacaatgtcgggtcagtccgcaggcgtgatccctgggctgagtgacatctagctgagatagaaaatggtagatctaggattaagcaaatcctgttaattatatccataaaaattgtccaaaaaaaagatatagaaagaaacatttctttcaactcagtctttgagcaatggccatctgtataaaatacattgtcaggtatgtccatcccatattcaccccattcctgctctccagtctcaagatcctcgcaatagatagcaaaatgggctaaacagtccaaatgaacacggaccaatccacggtagtactctccatagtcattttccgggtcttcggggcggaagaaagagtcgataaagttaacataaccgaccatcccccccggtttatcgttaatctttggccatggtagcccctgttcgataacagatggctttctaggcgccgcactggccaagattgatcgtatacagcgatcatctaacaaaagtgcgtaaccaaggcgaggaatgccactagatatgcggaggccatggctttcgacccattctttatgtcgacgttggataaccgcttccgacgcgccctctaacgcggggtcttcaaagataacattccgataaccctcgcggaccatttcaacgcatttgaggtcgaatcggtgccagctgcgctcgtaaaactccaggtcagccatacaggcctcgtcgagcttttcaatagctctagtccagtcttgatcggaagtgttgagataggaggtacgatagatggcccatccccatggccaacccccactcctaccagactcgtagtataagaagtgcggtacagactcccactcgggatttgcatgctgtcgattgattcgttcgacaaaagtttcttcgggtgggaattcagatgaacgccatggtgtaggccatgactcatcgtgaaagatactgggttgacgtggattccagggcatggttccggcaatggttcttgcaatggtgttgtaagtgggtgcatttagttggccaggaacttccacggcttgaatattttgaatatcgcttagcgcctgagtagaacccgattaggaaggcggtactggaatagcggtgtcctccatgatgtattgtcaataaaatattaaaaaacgaaatagcacgacggctgcatgattcgaacatgcgcccgcgaacggaattgatttctagtcaatcgccttagaccactcggccaaaccgccatattagataggtagcccgctccaaatgtgtggtagcccgctccaaatgtgtatcatagagctgataggaattgtgtatgctacgctggctagcctgaatagttctcgctaaaaataaatactaggaactctcgtgaaacatatctccataagaaatgaaatcttagtagactattcggctcaacggagttggtttcttcctagatagctcgagggctatagtaaatctaggattaaggaaattctgttaattacgtccatgtactccgcagcagcaaaaccataaaaaagattgtcagaaattgtccaaaaaaaaggatacagcacgacggctgcatgattcgaacatgcgcctccgaagagaattgatttctagtcaatcgccttagaccactcggccaaaccgccgtaattattaatagtaacatccgaactttggctctataaaccagagataataaatgtactatcaatagtcagttgaatgcagtcagcgaaccgtacgtagtcttattataatatcatgaataccgaagaactcttattatctcactatctctggtatatcctactacccctcaatttcccacatgttggactggaaatctgtaatgtttatctacccccgaggcaatccaaggggaatttgtacaaaaaatactaccgattttggacttaaacatcttgcccaagtgctcaccctttcactcaatcagtatcagcatcatcaaagaactcatcccagctgtacgtcggcccgacacagtaagcattcccagcaaccagctggtcgctgcatttatccggacccagagaagggttcacatccaagaataaaccccaaggaatcttgctctgtatgcatatcgtagtgcaggtttcttgcagcgcttcatttgtgacaacatgccacttgccgcaacgagttgtcgtcccttcagcaacagttgagtttttagggggctcgatttgcggaatgacatagccatcagcggaaccgggtgacgttggatcataaggcggggcagtggcattcgaagcaccagactgcggcgtgaggcaaatgacatgaccatacgcgacatcactgacaatatgaagattagagcaatcgtagttgatccatggattgtatttgcgtaatgtagttccatccttgtatccgacgccttgtgccttctcgatggatgtacagctgtcctcgcctttgatggtgtagacggtctcgcattggattggcatgcacagctttgtgccgacttggatatccttgcattcgaacaagttgtcgtgtcctatgaacagggcggctgaggagactttgtacttggtagcaatcgagtcacaggtatcgccggccacggttgtgtatttgatgccagatacgcacgagtctgcaggcttgtatggatcaattgttggttgcaggggatcgggaatatcagtaggaatattgaggttgcattttgaattgatgtatttgagttgggattggaagttgatgtcgtatgcggagtagggtgttgattgcatcattcggtaacggccgacatggcatgatgagcaaagttcagcagttggcatactatccaggtctgggttgaagccattgattacgtctatgtgtattcatggttaggatcgatcaagtgcaagcgcaagtaaacgggggcgggggatgcacgcttacctccacagtatttaccactcgtggcgtccttagcacaggtctcattccaccctgcccaagtcgccccacctttcatgttgaagggagccccagtctcttcattgctaccacaattggtagtaacttggtgaaaccaagtctctatagactgcccgcaactggaactgcaaaccagatcgcttagagtgtcgttgtcaaacccttgtctccatctaggcttttggaacatataaacctcatcgtcgcagtcaattagcctagtgatggctgtttggcaaatgggggacaattgtgacaaaaactcttgctgatatgttttatcgtaaaagtagaaccccgtgaacttgcgctggccaacgatgtcttttgctttgcggaaccacccaagcaaggatgataggtatccatttctcgcgtctttcgcaaatatcgcagtctcaccgagtgggctgatagactggacaattgccttggtcacaagattgacgatccagatatcgctactctgctcgacgtagaaagccttttcttggcagttgtttgtttccaaacaatcttgggaatatgagttgaaccaactatagatgcctaggaaagtcagcaaaagcctaagttaagaccgaaaaaaagaaaacatacctgcaccaagcatatagattgattccgagttaatcatccgtaccgcccatgagcttgtacatgtcttacactcattgctgtccgggtagttggggaatttccccagttcgaaaggctttggcattggcggagtgggttggaagtagggagactcggtctgtatcattcccataaccagattcttggcaccagaaaactggtactggtagaagacgctgtgttctgaggctgttccgtacatccaagtaggtccctggctctcaaccagaataccgcgagccacataaatgtcgacttgatcttgggtaaccttatcaaggtcatggtccgcaacccaggcccagaggttctctatataagccgaagcagattttgtgacatggagcagaagtgatgcagcgatacaatccttgttcagggatgatgcctttttggagcatttatcggattggagcttagaaccgatcgcaccgcccacgcggaagtgacaatctgtttttgttagttatctcatgcaaaaacataaatggtccgcgcagttggtattctcagtaaggaaaagactcaccccagagacctgcagagccctgtgtcgactcatgaacattccactccatgagtacggcaccagccgtgggcccagataccgtgaacatcatgttttgaatttcgagaataccggtatccccttctttgcccacttgcacagcgacgtggggattctcggcgtcttcaaatttgctgccagtcgccataatctgcggccaaacttgcccgataatgcgggagccaagaggaacatggagagtatctttaatgacataaactccgtaaggaaagtgaacaattgaagacatatttgcagcggcagagagtacactgttaagggccgctgtgtcatccgtgacaccgtcgcctttcgcaccataggccttgacatcgaaaacctggccacctcccaaatcaagatattgaggacggcggcgggcgaaaaagttagcggttcctttaacataagatttatcgctagtcagaattgatttgcggttcaaaacctgcaattgctcttgctgggcaaaatgaagtcctgtatcgtcatggtagagaccgaatccccacgaaggaacaagaacttcgtttcctccagctaggagaggctcggtgcgggtgtcggcaacaattgcatctttgacgttaaagaacccaacgttttgaagtaaaactgccgttgagttgtctgcgtatagcgatgtgcgaataccggtaggtgtgttggcgataatggcgtccaccaagatgtatgaaccgactgcctgaccagtgctttccaaacctcctgcctgatatagattagcaatgactcgtcttagatctgttgaacgggaacactcacaccaccagtcacaacaattccgctcccacatgactctatgacaacatcttgcattgtccacgcccagtcccaatggacctgaactgcggtcttgcaattcacgaaaacaagttgactggttgtaaactgttggttacccagataggcactataatccatgcataaatacatcagctttttctcattggcaatttgtgaactcgtacccgaagtttccacccacgaaggttaaattgctcatgaaaccgccacttccgttttccatgtagatgcccttgacagtcagtaaatggaatacttgaattatggaagcttacatacctgctgtgtgtttccggtcgcttgcgacatgtaaaactcgatattttcaagagttgttccttgggcaacttgccagtgaatggcacatacatacgcaccggggtctgtacgggtaatatccattttgaaattgcggacattgcgaaggaagttgtttgtgttcaagtaccttgatatggtgttagacaaattcgcacagttggggcttggtacttaccattgctcttggtcgccgacataaacgtcagaggtaatgacgcccaagccaacaaagctcgcagcagccaaaattgttggataattagtcggctaaatggtttggaatcagtggatggctcataataagagaacgaaaggttctaccatacatctcccaggaattgcgtgttgtaatactggatgatcggactgctgacgaggtatgttccaggaggaaagaataaaatagccgggaatattgtgcttgaaccacagtttgctccacatcgatttccactggagatagctttattgattgcggctttagagagtcgaacagttagttatatgctgagagtaattgacggcttctatcttaccagtgtcgtcggttacaccatcacccttggcaccatagtccttcacatttctccagacctggtaatagtaacattagctagatacaggtagaagtcagataaaggtgggttactttatatccagatggagcgaatggactggcagcattttgctgcagattggccaaccaataatcagaaccactcgcagctctctttacaagagtagaattttcggattgcaagtcagacgattgaagcacagtctgttcgtccgcaacataaccaaaaagcccatttggatgttgaagccgctggggaggtcggttggtatcgtttgtcttggacctgtacttagcatgcaccttggcagccagagcctcctcctcgccggtggaagcggtgggtcgaacagactctgctaaggctcttgctgcatcggcgagatccttaggaattgtgtaggcaaagctatcattggtgttggtgctttcttggcgtttttccttggacaattcagactcagacgcattttgaagggcggagagcctagtgacagctccccttgaataatccaagggtggtgcgtttattctttctccagtcacatcctttgcgttggccatggaatatctgttgaattttacattgtcaactcttaacttgttgacaacggccaatgctctcagagcctcggaaaccttggtggcggcatcagagttcccaaattgagaggaactcgacgcagcagcagaagaacttgatacagtgaccgagacagaggcgacattctgacgattgaagtgctggtgtaggtgttcatgagaatggtgggcatgaattgcccatataccagtgatctgacagataagcagtagccatcgtagaacaaaaatcacccccgccatcttgcaaataaaaaggcttgaaattgtcactggatttggagagttccaggcagaggaactcctagagataaagaggcgggctttattggaaattgcatcccgaaggacttacaacgtatgtcgaatggtttcgttggaaacccgagttaatctccggccaattgcttggcggttacatcgtttctgatagtgtgataaaatccctcaaaatcgaggggatattaaacgatgccaagtgaaatgggccaaactggggaatgctgtatatatattatttccaccgctttagtttccgccttcgtattatacaaattaatacggagttcattccgcatattctcgacttaggacagcggtctaacctaattaaaagagctcatggctttcctattttcaacacgagtgccatttattatggtatcgctactgtaaaaagcacagccttcgaataatttcagccacatggtagcttcattgatctaatcacctgatctattaccataaagctattcagagatcatctgatctattgagaatcacctgatttactactcttttcccgactttattcttctatgaacctactattctcaactgcctattactactccatgaatatcgctccaattaatacttcataaagtagtgtaatactcagaattaaatactctttcttatggaattcatttcatatttcgaaaaaaaaaaacggattaggtgatcgatctctgaacagcttcatattttgacagaacagatgtattaataaggtaatctctgcatagctctgttgacaaggatgattgaattaattatgcgatctctaaatagcttcattgacaatatttgtattcatcagtcaacggtatgcttatttatggtaatatcaaggaggccgaataaattatagcagtattgtattgttccattagcagcgattctaccattctgcatggcagaaatcgcattccccatctcggctgcccatagtacggccaagtgcttgagcttcagatttcttggttctgggtcgattttccgccgggatggcccgaatcctgcggttcaaccggaaaccaagccgtcttctcctgggcaggtgcctagatacagaaaagaggcttgaaaatttgtggatgcagtgctatggtatcaaccgccaagccacccggacaatcactagttaagcctcgttgtttggctcactcccattttagacccttattggatatttggacttcgtattcggtcccttcgaattttataggcaccacaagtggggttttcaaaagcggcgatgtaacaacgactctactagcagaatctactccgtactttcaagcgaatttccacttttagcacatattgcaatcgtaggattcggatactcctcgaatcggactaggtgcaatttcccggtgtctcacctcaccatgcagtagttcaaagttatacccagcaattggcttctgataagtgtataagatgctaaatcattcccactatatttttcaggagctcaagccaattagccaagatgttgggaaaacatatgctgaggttaagcatactattatgtgtcttcgcactgctagtccttggacaggattgcagtgcaagcaagccttgtgctacaggatgctggtaagtgtagccttttgggaaatggaaaaagaaacaaccacgcatattctaactgttggttgttcccgttagttcgaagtctggcttttgcggaacaactctagaacactgtggtgacggatgtctggcgaattgtgattataaacttgggtgtgatgcaaacaacccctgcgaggaaggttgctggtaataattcctgactcccggtttgattggaatgatcaatgtttaatcgataatcagtaataaattcgggttctgcggacatggccccgacttttgtggcaagaatgtctgcgttgctggatgcgaacgcaaatcggaatgtgatcccggctttggaggagaatggtcagagagcaaatcgtgtcctctgaacgtgtgttgctcagatttcgtacgcggcccaactgacctctggatgttgtgaatgactgctgactcgaatatctccagggctactgcggaacaacaaaagaatttgtaaggaataacccgcatatctcgatatttgatgtactggctaacatctcttagtgtggcaacaaaaccgtcaaacacgaaacctgctctaaagatcgctatatggacagagtcgttggctactacgaaggatggtctagccggcgtccctgccatgccttctggccagaacaaattcctctcggcgtctatagtcacgtcaacttcgctttcgccactattgatccggatacttacaaagtgacgccgtcagaccatcgggatgttgatttatatagccggttgacatctctgaaaagttacgacaaggaccttaaggtcatgatcgccataggtggctggacattcaacgaccctggccgaactgcaacagttttctctgatatagcagcctcagaagcaaagcaagacaaattcattgcttcattgatctctttcatgtctacacatgattttgatggtatagatctggactgggaataccccgaagccgacgaccgtaacggaaagccagaagactttaagaatttcccaaagttcatggctaggctgaaaaacgaactgaaaaagacccctggacgaagcgaactctccatcacgctaccggcatcctactggtatctccagcacttcgacctcaaagagcttgctaagcatgtttcatttttcaacatcatgtcatacgatctgcacggcacctgggatcaagggaataaatggacgggtgcgttcctcaacgctcatacaaacttgacagaaatcaaatctgctttggagctgctttggcgcaatgatgtgaaaggagaccaggtcgtcatgggtctcgcattctatggccgttcatacacaacccaaggctgtgtagagcctggatgtgtgtatgcctccggaggtcttccagggccatgcagcaatgaggcaggcatccttctcaacaatgaaattatggatatcatccatgacagaaagctggtgccaaagctgtacaaagaggccacggtcaaggttgtcacttgggatgatcaatgggtctctatggatgatcgagagactctagccatgaaggccaattttgctcgtcagcaatgtctcagcgggttgatggtctgggcgatcagccatgacacttcaacggcagacttttcacgtgatctagcaatggtgtcaaaccgccaagtgttgatgcaacgagccgaaattgacaccgatatcatcacagaaaggaccaaccataagcaatgccactggaccaactgtggagatagctgtcccgcaggatggcaaatgatcaaacgcgaagacgattggaagacaacgaatcctgaatacatgatagatgatacccactgcgagggacatggctcgcgctcctggtgttgtcctcctgacgccgaactcccaaagtgtggctggtataacttcaatagaggcaattgcaagcctggctgtgaggatggaatggttgagattggctcgacaacaaacggatgcaaaaaggaagatcaataccagtcggcatgttgctcagtggaagacgattatggaaatgggttgagcagcatggcagtctacaatacctgtgaatggtcgaaggagaatccccagtgtgacgatggcaagtgctctgggtcaaaaagcacaatccttggacagtccggtcaagggagcggtgatgtctactgttatgccggggacgtctggggcgatcattggccaaaaattcagcataccttacggaaatactgctgcaacacatcatctaagagcaaccgctttgagaactgcgaatggcgaaatgacgtgggtttgcattgggtcggccaaagttgcttctccggatgtgactccaatcaagtgcgcgtggcgatggacggctttaacgaaggctgctacaaatccggtgcccgagcatactgctgtgatgcagtcagttacacggagactgagcgcatgtctgatgacctgcaaaaattcaaagatgcactcattgactggacaatagctgtggaatgtacgaattattactactccgcaacaccagccaagtctctaagtattcgtgaggacgattgcgagatctttgcgtcacatatacttgttgcccacctggttgaaatcctcatgggttacgagtccaagcaaaccacccactggcagcgcttggtcaatatctggaacgatgtcgtaagtaaccagctcaagaatttgaacacccgcattatgcttccgttcgttttctcgaatacctcatttccagagctcctcgcaaacggttatcaaaccaccgccaaaaatatcctagatgttcccgattggtatgataaacgatttggaaacaaggattcggggataacatgctcgaagagcctgtgcgactatgaagatggattctgtgaccagaccgacgacgacgacgacgacgacgatatgtttacccgacgcgacctccaatggcaaaaggtttgtcaaatctccttaatgcatagatccaactaattttgaataggacaatggacctgtcctacagaagcgtgccagctccaagccgatggacttcatatgtattggtaaagccggcgtggaaagagttttggcgttcacccgatttgcttatcctggcccaaaggattggttacaactcaaggccaaaaagccagatccaaaaaaacaggtaacggtcaatgaagccgtcgactacaatgatgacaaggattgcggggacactgctatacaagaacgacaagcgacgactgcggagctcgaccctccaaaaggaaaaaaatctaggttcaacagtgagtgttcctggcgaacgaaaccttggtaaatcactagctaataatgatctagcggatcatctcctcgagatcaagttgattcccaagtttatgctatgggctattggggcggggaactgtcctgttgattgcgacttcttcatcgattacttcggcgaagatatcatccccaagactgcagaaaaaacaccaggaaacaatcttatcctccaaaagcctattgcgcgagtaatggagcaacttggaagcaaaaccaacttcgatgtgttccggttgatggactcagctttgaacgcagtaaaaggcgacgtaggtctctggtattttcaaccgaagaatagtgctgacttctttcgcctagctctggagttttgatcgcccacaaaacaccgcatttgatgatgccacatggctgccacttgtcgactctgatgacagctctaaagctttaaccttgctacgaagcgtaagctggcctgtatatctttgattccccggcttatttttccctgctgacctgttaccggctcgctgcaggtcttttccgtctataattatcaaaattcagaaaattttcagaaacgattcaatattgtctacaagaagattcgtggcgagttagatttggctgcaacagaatacttcaaactttctggaaaggcagttgaccttggggagtgctgggatcgctttttcaaaatccagaaggacttgatggtgagctttggaaggaaatttgttgagaaaggaatcgaagagttagctactcggtgggctaatgattcggacaaggagaaagctgaggtggttaaccaggtgctgaaacagttgagggagaagatggggcagatctatatgaatgatttcaaagcagagtatcaaccatcatggaagtgattttgcctgctcgtccaagctggtcggtatcgtcagcctgagcgtcaaatgctattgggtttagacatatgtgccaccagcgtttactttctttcacatatcggactatcccatctaacaattttatcgtgaattaagaagtctagggcattcctcattcacttgccaacctctcctagtctctagtaaaactctccgatcaaaatgattatcccattcgacggtttgtggcattatttacacccatgtgttacagcttatgaagaagatcgcacctaattcatccatgccatcaaaaaggcgtataagtggacggaaaaataccctttgacacacatcaacgccatttcttacatgtctcttagttttgcttgccgaagggggccaaggattggtgaacacggatggacaactgaaggtataaatagagctcgaaccctctaatccactctgcgcgcagctcctcagaatccctccacttgccatccatgcgattcccacccagcagccatactcggtgcaggaggtctacgtccagcccaaccatattgtcggggcaccgttaagtcttctattcgttgctatttacgaccgaccgccaagaccaggggaacatgatatccctctcaacgccagtggttttcttgaaatcactaagatgctattctgatatgctctattttgctattgggctcactacccatcttctctagatacttcttcgattttctgtgtatcgttaattggaatatttctacaaagaactgtacctctattgacctaaaatctattccatctattagggatctagtacgcatattatccttaatggtccgagctattatcacgttgagcttctcgaggtcgaagtagttcgtgaattggtttttttttgtctattgtgtgccaatagtgttttatagtacgaaaagtggatgtaatttaatagatacgtaattatctactactccgtagctaggaaataattggagcttttaaacgagagacctaattagtatgtccatacggagtactctgtttcttcgtgcgtgtaaaacatgcacgtaatcagtgtgctttgtagtggctaaggtggccgctcactatatcaataatggcggtttggccgagtggtctaaggcgattgactagaaatcaattccgttcgcgggcgcatgttcgaatcatgcagccgtcgtgctatttcgttttttaatattttattgacaatacatcatggaggacaccgctattccagtaccgccttcctaatcgggttctactcaggcgctaagcgatattcaaaatattcaagccgtggaagttcctggccaactaaatgcacccacttacaacaccattgcaagaaccattgccggaaccatgccctggaatccacgtcaacccagtatctttcacgatgagtcatggcctacaccatggcgttcatctgaattcccacccgaagaaacttttgtcgaacgaatcaatcgacagcatgcaaatcccgagtgggagtctgtaccgcacttcttatactacgagtctggtaggagtgggggttggccatggggatgggccatctatcgtacctcctatctcaacacttccgatcaagactggactagagctattgaaaagctcgacgaggcctgtatggctgacctggagttttacgagcgcagctggcaccgattcgacctcaaatgcgttgaaatggtccgcgagggttatcggaatgttatctttgaagaccccgcgttagagggcgcgtcggaagcggttatccaacgtcgacataaagaatgggtcgaaagccatggcctccgcatatctagtggcattcctcgccttggttacgcacttttgttagatgatcgctgtatacgatcaatcttggccagtgcggcgcctagaaagccatctgttatcgaacaggggctaccatggccaaagattaacgataaaccgggggggatggtcggttatgttaactttatcgactctttcttccgccccgaagacccggaaaatgactatggagagtactaccgtggattggtccgtgttcatttggactgtttagcccattttgctatctattgcgaggatcttgagactggagagcaggaatggggtgaatatgggatggacatacctgacaatgtattttatacagatggccattgctcaaagactgagttgaaagaaatgtttctttcttccccagatagaaacgttgacagaactgcgagtgtgactgagctcgagtatatcgagcgccaggatatggagaacttagcattgagtaatgtgccgggttctacctaacactggaatgacaccaataccaacggcttttttaatccctagataatccaacagttatcctctttcaaaaggtctttttggtcttttctaggatatgttagaacatgaccactaactacctccgaatattattagtagggaacctttgatacaagctatttctagacctttaagagactgcatacatatttgtataaatattgattcatggcagctgattaacctcccggcgaaaaacccggtgggcgcgatggacccaaaaacctccgtaaagagcaaactatgacaaatcagaataacatcctagtgatttcaagagaatcattggcgttgagaacgatatcgtgttcccctggtcctgggggtcgatcgtaaatagcaacgaatggaagacttgacggggccccgacaacgttgttggactgaacgtagacctcctgcaccgagtatggctgctgggtgggaatcgcccggatagcaagtgtaaggggggctagttgacatttttcaaaggtgacttcagtcaaccccatcgagataataataacaatgcgcactagaccccggggaatgataagccatctcttagcgtcttcgcgaagccgagggagggatttagaaacgcccattggggcagcgatctggtggtaagaacgcatggcctccctgtttacctataccggcggtagacttataggtagctgttccagtctagactatctctaaccacctgagtcccattgcaataagcttcctgtcggttgctcgaccgaattggtttgtgactgcgtcatggcgttctgataggaccactttgatcagccctttcgtcccctcctatcgaaaacgatattcaatacaccctagactagtcggatgctcttcgttgagatttttaattgctcgtgccgatagaatgaggacgacgataaactcattgccatctcccttctcttatagagaattcagtaactgctcagcttcgagccgtaggcctttgaagcctcggaaagtgtgtacaatagggtccgcgggaagggcggacataagggaagtgaaagatatgcccttctcttgtcttcatatatctgaggctggggcagaatcaacgtgagccatggtgattcggccaaccttggtgccttccataggacgtgattggagactttctgaagtttgatgacccgggccataaagaagttaatttacaatttatgagcaactgatcggccaaataaagctacaagtgaactactcaggcacttgaattaaacaaaaagtaaaagtgaactcaattgaaagagaaaattgggtatcgttcgcaaactcccgctaccatccgctaattcatgaagcggcgtcaaaaattgacgccgaagtgagcgaagattcaaatctgatggctttgtcagcataagaacataaacagaaggtttatagactcaccaatgcaagaggaatgcggtgaggaacccgaccattgtgcaacagcatagccacggccttctggggagtagcctgtagcttgcggtaggcctcccgaacgtgccgtggctcaatgggagtgcgcccctcctcgggcgggtcgaacaggccagtctcgcgcttccgcttcttgaggttctcaccggcctcggcgcccccgcgacggtgcttctcgttgtcttcgcgctccttgactttgagcgcctcctcagtcagggtctggacgatctcgaatgtgagaaatccgaggatgtccacaatgtcgtcgttcggcttggattcggtcacgatgccgaatcctgcccattcgcggaatcgcttactcttgcggtaggtaaaggaagcctggcggcactcggaccagaatacatactcttcccttgtcatgtggcgggtgcgttcatcggcggcggcaagacgctggagtgtcgcgtagttctgctcctcctcttcttcatcttcttcatcttcacgttcgggaacctgaaccgagtagaaactgttgacatcccacgcaagtccgaccttggcgcgcttattcttgggcttgggggcgacgtcttgggggcctgcaacaacaccagccgcatcgtcggcggcagcgaagtcggcggcgtcaccaccacccttgtcgtcggagtccttgacatttttgcggacgtccttccaggacaggaaggttcgcagacgggagactttagccctatcgtggcggatcaggaaaatcaggtcgtcggtagagatcgagcgaactccgcggcgggttgccaatgcagtgctgcgggtaagcttacttggtcattagtgacaagctttctagtttgaaattcccgatactcacgatttcgatcacctgttgacgcgtgatctcttcaattaaagtggtagtctcctgagccggctctgctgtttctccggagacaaacatcatctcaacatcgtcgttagtaaaggatttcccaaagttgtcttcgtccatctcatgatcttcctggctctcggtaattatttcggggctagttgcggcattgtcgattcgggaactgaacgaggtcaagatgcggctggaaatcgagagaagccgaatgctagacagcccttcctcagaaggaccacgcagcagcttggcaccgaagacgtcttcaacagaatgcatggaaatatcgtcgcggaaatccaagcccgagtctaaagctgcacaaggagcattgacgggggagtaaaccgtacaatcactcatggtaacatcgagatcatccatggtcccatcagaaacactcatggtcacatcagggtcagtcaaggccccatcaatatcactcgaggtcccatcataatcactcaaggacatattggaatcactcgaggccatgtcagaatcactcgaggtcccatcagaatcacttgaggccatatcaggatcagtcaaggtccgatcagaatcactcgaattagaatcactcgagatcccatcagaatcactccagatcccatcatgatcactaagttcttcgtcgctcgaaggatcttcccggctctgtgcccagagcgcattgattgatccgacatccaggttgggagaagacatgattggggaatcagaaaggatgaaatgtcaaaggatgcgtgagacgcgtttgttggtgggtttgacaaagtgtttagaagacaaaaccctcgaaagaggacgcaaggcagtagataatacgccgaaaatacaacgctgcaggggggcttctcttggtaaacgaagcgtatgaaccgtagatagaaaatatgaggagtgacagctggcggggaatggtgaacgagaataagcgagacaggcaagtcggtaagccgataggcagagtagcagccctcacaaggtcacaaggtcggtatcgataaacagctcttgcttgtgctcgtgctcgtaaaccccacaactccgtggatatatgagagaaggcacgaccatcctgccaattatcctaggcctaggaaccttgagatcgatcttggttttcaacacagtatccttcagcgatctaacgtcaaagcttcgaaattggcagtaccagtttcaaaggaccagacatctcgagtgttgaagttctgtttctcgacgtcaagatgtgcgtatttcaacaacccaacaatgtaagtctgaaaggcccagctagaccatgacaggacatcaaacgggtttttagatccaatattgaccctcgctattgatcggagaggacaagaatgagatgtcgttattccagcaaatgagtacattcgcaaaccagtgatatgttgcaagtccagccggaccgtctgtagacatcatgattgccaacctgaaaggcaggttcgaacttcgcaggacttcttcctatcggactcggggaatcgaggtggccccggccctatcctcagagactatgtgtttgcgccacgcaagtatgctatgtcgcaaaggcagtcgacagtcacaatatgtttagaggccttcgaagcctgatcgggcaataagatcgatatattcgagagccagaaagatcgggagatggaaaaacctcagcaagatgaaccagatatcagggactcacctgttgtatctcctgccgatacttcgggtttcgatcggagctcatgatgggtggtggtaaccctaccaaagagaatttcttcgattatcaagatgagggttacactagtattctagcgtgagtgaatgttcttcgattgattgaagacaagtgagagatgaagaggagatgaagctctggacgttcacacaagcacagggcgatctggggacgataagcgataaccggatgttctttgatccggcatcttttatccggcggtggcggagtattctgccggcatgcggggcacggctgtttttttacctaactgcttgttatacagtgagattcattgtattctgctcaattgcatagcctgagatcttattgtcaggatgctctatctagttggactcggcctcgccgatgagacggatatcaccgtccgcggtctagagatcgtcaagcgggccgagagagtctatctagaggcttacacgagtattcttcttgtcgataaggaaaaattggtgagttgagctccaagtctttactttgaatcccatatgccaatgagtcaatctatatctttcgcgcagatggactgattaaacataataccagtaggaagcgttttatggccgttccgtcatcgaggcagaccgtgaactagtcgagactggcagtaatgacatcctcgccggcggcgacaaagccgatattgtgttcctggtagtgggagacccattcgggtacggtcttgatacatctcccctacaagatctctagctaaaacataccaccaacagcgcaacaacgcatactgaccttgtcctccgcgcgcgcgaacttggaatcgagaccagagtcgtcccgaacgcctccatcatgtccggaattggctgcacggggctccagctgtacaacttcggacaaacagtcagcatggttttcttcaccgagacctggaagccgtcatcgtactacgatcgtgtgcgcgagaacgtgcagaccggcctacacacactagtcctgctcgatattaaagtcaaggagcagtcactggagaatatggcgcgcggacgccgcattttcgagcccccgcgctacatgactgttgcacaatgtgcggcacaaatgttggagacggaggaggagcggaaggagggtgtctatgggccggatagtttggctgttggtgcggcgcgtgttggtgctgctaatcagaagcttgtttctggtacgcttaaggaattgtctactgttgagatgggcgcgccgttgcacagtcttgttcttcttggtcggaggacgcacgatcttgagagggactatattcgcgaatatgcggtcaataaggagacttttgatgcgagctatgtcaagggatatggggctagcttgtaagttacttctgtggagatatgagaatattaaaatacatgataagatccttttaaaatgtggactgatttacttgatataatacaccgaggttgttgaaggacaaaggttggaaagattgtatatggtatattggccttcattcaatttgatcctgcgaggaccagccgaccagagcagtgtctggatttttctattttaaaataggaagacaaatgaaaatgccgcaatataacgaaagatgcaaagcaaatggtatccaagaaacaaaaacgaaaaacagatgcgaggcataatatcaaaaagaccccaaccgacaccttatatgcaaaatgttgaagcaatgtacaactcaactctcgagaaaaaagacaggcttatatcgtatcacatcagatgtcttcttcctcaccaggaagaagaatctcatgtccagaaccttcatatacaaagatagccgcaagacagccaaacacggatactaaggcaatcatccaccaggcgaagccgatcatgccaatatccagaccatatccgtaccacgcgcctgaaaatataggtccaatggtacggaaggctgacgatacggactggccaattccgtgaattgtgccgaggacggatgggtgtggcgagcaattattcaacaggataatagaggtgggaagagtaaaggttcgggcagtgacctggaagaagaggacgatgatgatccagaaccagacccaggggccgttggcttggccaggagggggagttgtagacggagccagtgagatatagggagcaatgaagtatgcgatcgggaagagggcgaggaaatactggtagctcttggctgctcccagacggccattgatagtaggatatatggtgaattggaggaccataccaattacacccaaaatggcggtcgcaaagccaacgctctgcggcagcatgcccagtccgccggtgaaggcgaatggcaagctccgtgcggggctcgcggggtcattggaatcatagcggggggtagataagaagagtagccagaggttgttgaaggcacccatctggaagtcgaagaaagcctgtgcgcccagtgtgcacaacacgttcttggtccagattcttcggaaaggcagggcacgttggagacgggcaggcttgtgcgctttttcttcgagctcgtagctttctgagcgatccgtgggccggtctagcaaaggcccgtcctcttcgtagtcgccgtgcggaagccttgtgtataaggatgatgaagaggggaccactctcctcacgccgcgcgcaaacatcttcttcgcaaatgcacccaggccaggcttgcccttgcaagatgccaaggtctcttctaatccatacgcaaccaaagctgcagttgaagagaggaaacagaagtttgcgaacattggcagggcgtacgggtacgtctcgagccattgcactccgttcgcacctccaaaggaagaattgggcccaaaaagacgagggtagctcttaacgggatcagccaacatgccacccatcactgcgaaactggttagcaaattgtcgcatggccgcgaacagcattgacagaatgaggtactcaccaggaccaaataacgaagctatgttgaacccaataggcaaaatcaagaaagcgcgtgagtgatatttcttctccttgacattctccgcgatcatagttcgaatgataccaacggtgccgttgatgccgccaccaaacgagcgccagaacacggcctgcgcgaacgacgtcgaataggcgacacccaaacaagacatagcagtgccaatcagaccaacaagcagaacaaactttcggccgccccactcagcatcggcaacacgaccccaagggatcgccgtcgcaaactgagcagcggtaaaagcaccctggagaattcccgcctgggtcgcaacatccgagtcggagaggttcgggtcaaaggacttgagctgatagaacatataggcctgcagcgaagcgatctgcaagaagtcaaagacacggcagagccccaacaacgccaattgaccctttcgcggcagcgacatccatgttacgagcgcagggcgcgctggcgcggacacagtcgggagctcattctcctgcacggtcagtacctgtggcaggccatggctgatagagcggccgcgcacatgctgtgcttttcgatcaccatttaaatccatcgaggtattccttagcatgttatcatcgaagacgggcgagtcgagcgagtcgtgggaggaatattcttcaacgctggcgagggaggtattggactcgcgtcggcggcggcctgtggtgttttcgggttccccggtgccctgggtgaaatggaagccactcgaccaggatgtcgtacgcgcgtggcgggcattattcgttttatgatttccagtcctagtcattgaggaatgcactagtgtaaagcgcggcgccgtaacgatcaaaggcctcggttccacgtatttttcgtggtttgggttccgtagttgttgatattaattatgattggctatgatagagagaatggaaagaagagaaaactggaagacttgtatttttttattttacttcgatttctcctatgttattgcgatgacgttttttctcggttcctaattgaggcccaccagccggagaatgccgttacaactttgtacacaataaagaactttatttttatattgaacataacatttaaatcaaatcccttaatataaaatccataagttgtatgatagatcgacaacgacgggcttgcgacgaccgctccacacctccctgccgattgacgacggaagtcttggcgttaaggaggagaacgttttgaacagttagttgctttacagtactttacaatacatcaatacaaaaaaacaattaataaccgtggtcctaccgcggttctaccatggtacaggatagagttcaagcgtatcagccacatccacgtttgtggagccgctttgatacaccacgtacaggtgatacaaatgtatacttcagtcctgccacagcatacttaaccctacaaggcgaagctaggagttgataacctatatacattgtatcccacgccacatacatgtatgtactagccaaattaacaatcctaacaaggtcgtattgtatctctacaaagcagtcgtattcggatcaatgcccagcgcgaaaccaactccgcctccctccggaggtatacgtatacccaggtgcgtagtatgtaactacaataaatgaattagtcatcccgccttcttccaaccttggttgaagtcccgatctcgggaggggcgcagggaagtgccacgcccgctcggtgactccatccttgtggataactcacggacattgcgaagtcttgatgcttggactccttctatagctccgtatactgtttcaagcgatattcaattcagtgtatgctttatcagtgcatcactcgttcctctcattcgttttactaaaaaaaggactcgacacataaaacggccgttctacaggcgtctcatcatgatcactctctccactcctcttggggcccaaaagcgactgcattcgcgcccgaaacatctcattctgagccaacttaccaacaggttttactatatcccattccctatccataaaccttgcatcgggctccccttcatacgtcgactccggaccatctatccacgtcgttccctcctgaaaacacgcgtctttcatttcctccgaactcctattgatcatactcttccagaatcccccttccccagaagaaacaacaccagcatgctcaagcatttcaacagtgccagcgacccagtcttggcaattcccaaccccgaactcggggatatttgactcgtcgttcccaaattccgagagcaggctagcagcttgttggctctgctcagaagagagggaagcaaactcgtagcgacctttcaaaatcgggtcttccagtggctgtgtccgcggatcgtagatgaagtcttcgtcggtggggttgcgtatatggtgcatttcgcaggtggaggagccgtgcttgtagatggcgattcccatgtgggaggggccatcgctgagtttggcgtcgccgcggccgtagatgtttgctgaaaggccgtacatggaggataccatgattaacactggtagagtaaagggagtatgtagttgtcacatgtagttaaatgtccccttccccacaccgctccagatctacatccgcccgagagatcggcggtagttaggcaactccgatttattggtgataagagcctcatggcgtgccccggcgcgtattcaggtgtcaaagctgaaagaaatggaaatataaatagatatccttcgtacgctggttccattggtttagcatggacacctgggcatcaatattgaagtgactaggccccatggggccccgcacggctcaaaacatcaacaagctcgatatcactttctcccaagcaagaatacagtaaccattcgattctatatacggcatttaggtctttgatagacctacagtcgaaatttctgatgccaatttgaatgacagcctttcatcctccttttagtatgcctcatattgacaatgtttgtttcattggagaaaacaacttcgctggctagtcggtttcaggatgctcttccttcgattttgaaaaagtcccgccatactgagatatggggtgttgatttgaagcacgcggaatggcaggtgctggaggtggtcttagaaaaggtactctgattatgggcgcactagcacaccgagatttgtcactaaatcataaatagttcctcagatgccattccgcaatccttgcacttcaactctctagagcaagtgcctcactcgagaagactttagaatggagaagcctctctgacccgagagctctccttactgaagcagagactatccttcctgacttggatctatgccatattactttgaatgagggtcaatatgtgctgtggattaatattgacgagatggcgattaagagatactcaataatacacgcaagcctgacgacatctggattcttggtgcagttgggtcttgctgtaatgcaaaagctctccgtgcttctgatgcatgcagccgctagttctgatctacatgactattcggcttcctgtgtggttgaatttaagatacatgccattcaaaacaccaagagaggacagcagtccttccaggggaagatcagcaatgccattgaggaattggtgacattcattcggtgtcactatcctaagattctgggaaaggcatacatcatcaaacctcgtgatgaataccttgcaactcttgatatcaatgaatctctattgagagatacggtacttttggaaaatccagaggaccttgctcgatatcttggctcacaactcccacctcgatatggcggtactggggaatcgctcgcggaatgtgacattcttcctagttgcagccttgcggaggatccaacagggaacaacgacctcaagacaccagataccagtgcggcagccagtactgacatggagaagaccggcgtgaaagaagaaactacagcttccgctatgaataccggcagcacttctccccatggcttgaaaatagaggagcaaaaacctcgcttaatttactccgacatcattgaaccgccatctatcatactcgaccccgaagacttgcccaaagcaaccaacctttgtcccgacaaaatgggcgcgcgtgttcttttcgcagattcagacacagttgcgaaattcagccatggtgtccgcctagctgaagccgaagcgttacacctagcatctacccgcacgaccatagcaacaccaaagcttctcagtgcatatatcctcgatggcgtcggatacataataatgtcatatgaagtgggcgaaccactcaacaaatactgggaccgtgttccgaaaaccgagcaagatcgcgtcctagagcagttacgggactgcgtgaaccagatgcgggagattcccggcgatttcatcggtggggttgacggatcaccttgtcgggatggcgtcttcgaggccggctacggcgactacactagctacagccacggcccgtacccatccgaggaaagctttgacgagggaatgattcaagctttgcgagatcgtatgccctttaaagtgctccagggtgaacatgacgtcgaatcgagctttttcaacagcgagtacatgctgtatcagacggtccgaggtatcaaaaatcacaagatcgtgtttacgcatggggacttgcatgccgggaatatacttgttcgggctgatggcactgttgttctattagactggggcctggctggtttctggccggagtattgggagttctaccgtgtcatccatcattcaccctggagaccctcgtgggatcgtatggtggagatattcatcccacctttttatgttgagtatagcgtcatgaagaggatattcgcgaccgcgtggaactaatgcagggaatagtccgctgctttttgagaattacatgaatataatactccgtacagaattattattgtaaaaatattaaattgaattaatatcaagaagtttctgccgagcgaacaccggcgcgaaaaaagccacttcgatacatcgccatacatcacgtacgatacaaacgtatacgcggccttccacctgcatactttaatcgatatagaggtggaatatataattctcatactacataagcctatagaagtagtcatatcgtgcttgtgctatatctgcaccagctaggctaaccacaaatacaacgaggtcgtattattcacaaagcaatcaatacgaaggaagaatacccatcgcgaaagtaagcagctccgcctcgatccggaggtacgtatgcccaatgcgtatgtacaataggtgcggatttttcggatacacgaattatattactcggtggaaacgtctacgggcccatcatagacttctagatctatatcatagatacacgatgtaacaggatttttttcctatttgggtggctgatacgagatataatgcgtatagcgatcagtctatggatatatgttatggtagtatgtatgtacagcgccgagtaactagctagcatctagaacgcaaaaaagaagcaagaaataaagatacaagaacgaggagtcactattcgatccgctctcgttcacgcctatggccgtatagactccgctcaacgagcgggaaataggaagttgtttcgtcctctccgacccatcgacgccaattccaccagcggaggtcggtggcttgcacaggcgggtgtttccgctcagccgtaccgtccacaggcgtagacgattcctgatcccgcagctgggtgagcgaatgtctggtataatatcgatgtgcgaggaagattccggcgaagagggggatcgccacgaggagaacggcaccccaggcaagtaggcctgtgaaaatgtcagttttgcttgtcttcctggaagaatagaaagcatgttcaggatatacttacggccattcctccaccggtctgagtactttggagttccagccgggcctgcatagcccgatggatgtgtataaatattggagcccgggttgttagggtcaatccatggcacggtattgacacctactggcggaatgaaaggacgagctgcctcttcgccggggaacccataccccggtgcgtccaagcaggtagattcggcgcaaaattcgcgcagctcggacgagggcacgaaggtatacttggtttcggactttccgagcaaaatgccctcgcgatccactgcctcgaccttagaccagaggtagaacttgggggtggagtatttggtctcgaagccggttttggaaacctcgtccagcaaggtccaaggtccagtggcgttcatcgctccccaaaatcgccaggtctggacgcgggttgcgccgttccaactaacatagaagctggtggtcgatgatgtctccgcgcttcgggagtatgtccatagggcaggagagtctgtcggtgcaccgtcccattcaaacttcattgcgcggtagttcatcacggtgtctttggcgaaagagccccagaacagtagattgcccgcctcgtcgtgctcggatacaaatgggttgtttccccatccgatgaacgcgttttggttggggagcatctgtaggtttccctggctggagctcactagatcgtctcggattggagcgtagtcgcggagctgggtagccgttttttccacgtggtcaatcatgatgatcatgcccgctgaataggtatgtgtcttgttgaagccgttgtagccattgttgtagagtgagagcagtgtatgcgtagcattctcatacaaccaccgggcgtcatgttgctgcgaaaagctaaaattgatattccggaaagagggctgcgcgccgtgaagccgccacatcaccgagccgtccttaccggaaaccttgtagatggccgaagtatgccgcgacgaaattaaatagtcgccggccgcatttttgtcgacagagttgatatggaagtaatcccacggttcatgcacattcaatcccgtcccagaagtatccgtatgagccggccatgtatagctcgaggatggatcgacatggtcgagagaccgccattcaaacagcacgtcgttggtctccacgtcgatctcctggaaaacactctccatgagccatcctacaccagttttgacgttccacggtgtcatgtcgaattgccgttgttggtaaatggtcatgagagcggtcttgccgtcattgatgggacggaattcgtgcatgtcgctcgaggccattcctccgcccggctgaactgatcgcacaacccggtagttgttatccatgatgattccatgtccgcggcagtatcccttttgctggttgccctggaagaaacataggtggtcggcgcctttatacttgcacacgtggagtccatgggcgtttcccggccctgaaatcccccaaccactccatactaattcctatgatcgattgatgggttagcttctccatgatggacgaatctgaaccccaagaacaaagacctacccctgtgttatcgtagatgtatgggccggggttttgaagttcatatggtgtgataaagatgtagcccgggctgagcttgtctggattggtcctctcgatattgaagacgggcgggtatatgtcgggtctctgttgtaccgatattagagagcaagcacactcgggtcaagctaatttcactaaccgatttgtaaaaagaggtatcctctcccagtgtacagtcaatcgcgcataaccagagaatgccaagaaagaatagcgacggcgcagtccctaaagaggaaaatagggaggtgcccatggatccttcgcaccacttcccgatgcaagatagaaacactgaagaatatcacccaaaaaaatatctgtaagggaggttatactgaaagcaaatcatttagaagcatagaagaatattccacccaggccaagaggcccaaggtgaacgaacagtgtgtacgaatccctctccacctgtcaatgcatgcttttcgcatatctagtggggcctaagttgtgttgatcgtcgacgttcattggtcaattgtcatttaaagctagacaaagatgcttagtcagcggcaatccggccatcgctgcccagtcaaagttgtctcagttgctgaagttgcgggggaagtctatacgagcggaatcaaggttaacaatccgctctgtgaacaggatattctccctcaaaaggcttgattgtctaactcggttgttgttttctttcccaaatacgtgtaacttagatagtgtgacggtacggtatctctcaggagccgcgtcatgggcgatgtggcagccgctaagcagcccctaataccataactccgagatcgtatctattccgtaagctgaatgtccgagagcaattataattcacgggtccgtcaaaggttcgtgaagaaccatgtaacgtgtctcggagatacgcagtcacccgccagccacactcagacagacagctcaatccggagacgagttaacctgttcgggagatgcaaccaatggatcgggcttctacgattccaggcgctccgatcgagctaaaagctaaaagccacgtgcatgtggcattatttgttgcgtacgccggtagattgaaagtgggggattggttcagggacggcggtggcgcatggtgcgtcgtcagagcatacgcgggctgttgttgcagcatctattctggtccgtacggcgtacacgtgcattggatttggacctacagtttggccttgtgcataatttagtgtccgtaattggaggtagacatcggacgatatggatactgtcgtaccagacaccatatgttgattgatttacgagcccgtgtgtgagattctccagggacatcttattttgcacgaagtagatcattcaacattaagagctacagcggatagataagacattagatgaaaagggatcttatactcctttcggcgtacccaccagagctaagaggacctatcaggtgtccacgaccacagctaagatacagacctttctttctctcatatgctgtgccaaacagggttcaaatccaagaacaccagtccaagcccgaatagtagtctcaaatatccaggcccggacgaactcctcaatcccaaaataacgagcaacgaacccatcagccactaagtccacgtataccactccgtctatattacgtacatccgtcaaagcttttaattcaagccttctaggggatccactccggcgcctagaatgaaagaagcaatctaagccccgcttgtttcgtatcgaatagagagaagcagttccacgttgtatcagatgattgtttcccttacaaggatataacaggagataacaatacgtgtaactttcaatgtttggaacgcaggttcacgtaattaatacccctttcgcccactgccaagccgctaaccagggaaactccacggcacttctccaataaggtgtggctggtacatttcctctggtttcgtacgagtacgaggtggaaggcttggggctgagtgtcgatggttgggtgtttatttatttgaagcggttgctatgtgtacatgcaagattgtcgttatgagcatacttctattctcaaggtttattgtatgtagcgaaacgtcaaagtattgattcgtatatatttcgcacgcttttgtcggtttgactttaataacaattcaatggcgccttgcatcgaccgattcatgaaaagtaaggcttcacgtagccaaaactctaggagccccttgcctctaggcaatgcatgatgataacagagcctcggggaagcgggtacttggtgtttatccctcgatttgaaagcgggggtgctatgatgcgcttgtacagagtatgcataagaaatgatggtagaaatagaaatatatactgttacattaccggattgttctccaaaacgcccctgtaaatggcaaaacaagagatcagagatgatagatgcatggtctgttccaacaagaaggatgacagagaaaaaaaaagccacggggtctgacgtactagcggcgcctgcgcgcactagcagccagcagagaaagtgagacgtggggaatatgagaaaaagaaaaaagatgcaagacaagaattttagcgaggggagaaacgcttgaaagccaaagtagcagcaaggccagcggcaagcagcgaaccaccaacagtgacggcctggagggcaacgttcatcatctggtgacggttgcgggtgctgcagcgcttgtagaagtcggccatgtcgttgccgcgggggaagggggtgtcaggaacctcctcctcgaggaactcgcagagcggggcccagccgtcgttgatgttgtattcgagcagacgctcggggggaaccaggctgcggacctgggcaacgtgatcctcgtagacttgcttgcccttgcccgggaagtcaccgcggaagaatgtctcaaagaacttgttcagcatagggtagtacatgccagcggcccagctgaagttcgacacgaacttgtgctctgggtctgagacacgccagaagacagtcttcatgacggagctgtggtttgttagtatcttgttcttagatcagaaacacagtgtataaaatgtgacttacgcatgccatgggtccacgtcacgggtagtcagaatgaccttcgcattgggataggcctcgatcagctccttcgcaaaggcacaggcaggccagtcacagacggcttggcagtcacccaggagctggtcccattctttgcggccgaactcgccgactccgtcgtacttcgcgttcagggcatcgtgccacatcaagcagtccggcgggttctcaacacttgcgcacatcatgtggtagcacttgccatagcccaggcgctcaaaagccttgcggagagctgtgaaataataattagtttgtatgttctgttcccatcggacccggtatatacactaatatacaccaagtccaacgcaacacagcacctcatacttacaggcagttccggtacggccaacacccagagccaggaccttcataggcacagtgcggtggcatttccggcggttaatgtttgtatcattggtgaagacgtcggtaatgggctggggagccagattatcggagagcatgagagacatggtgggtgtttatcagctcaatcgcaattcgatatagtttggaagtgtatagagacagaataagtagatgatataaacgaaagaagtaataaagccggacaaagaagggacaatatgtatggaaaaagtctagaaggaaggggggttataagagattgatatggagataaggggaagagtagaataaattaaaaaacaaaaattaaaaaaaagatcctaaaaaaagaatccagactccggaacaactgatcctcagggagatcgaatagaacaatgaagtgtactccgtagtgggcattcggcagtggcagtgccaatgacgaggctcaaaccatagtccctaagtacgatgtgtgtatgcctccccgcgagtggcaacgttcctatccgctatgtccgagtcttggctttgggtccttcattcctgatatccgattgtgccccgtttggaccggtggattccataaaaccaaagggcccacgagggtctacaaggtatgttgtacattgaaagtcattgtatgttgtattgcactgaggcgcgtatacaacatagacacgacgtcacaggctgacgcacagggatgtcacggatagtcaggggtgttttgtggagtcgtgtatggtattgtatgtattgtacagttcgtatggtaaaagtccgagtgcaaaaaaggccagggttttggtaaaatgaaaattaccaaaagaattgttccttcctgttgccaagactcatccacgtacgcttcgaaatccggaatattctttgatcagtcacgtcgctcggcaaaatcgacgatccatagtgccggttggtggagcactaaatgggaacgcgtacaccctcaacttcggcgagtgcggatttctgaatgaggccgtgaaggttcgaatgcaccacatacattgtaggctcatagatcatcgtagactcatctactatgtatgtataagcctgcaatgttgagttgctagttgtcatatcatacccagcacaccacagtggcagtgacccgaattgtgtctgccaagcttggcccacaatatcccaagcaagtcaatctctcagctgtcccgcccaggggaatatcgttccgagtacgagaacctggcacccccgctccatcgggttggttgcattgtattcggctcattcgagactgcagttgtgcgtttcacatgtcaagcgtaagtgaaagtttcaagtcgtctcctggatcgtccggtcactttgcctatcacggaaaagaccatctgctcgatgtgtcgccgtcccaaagctgttatctcccaagtaccgatcaggcaagttgccttggggtgttgaaaacaaagttccacccgattttcattgccagggataattgtccggtgtgtacggagtattgtgtgaggattcccggttctgttgtcacgcatcagtactgtcatagcggccgaactgatcgtcccgtgttgttgaggtattttccactcggggaaggtatcccctcgtggaccctggctttgtcgtgtgcccaacaaaattgagcagatgtctgtgaggcagttaagatgatatcatagtcagcctatgatggagagtgatagtgatagtgatgttccagagaaaccatcgtcatatacataatgcctataacatgcatgctaaaggcagattatggtagattctttgcggccagttgaagtaaaaacgcagaaagggaaaagaccctttcgaaagggtcaacagcgagagagcttcttaaatgtgctatgccaagacccttagactcacgctcgcaatcgaagctataatcacatcaccaagccacgaccgattgggaagcccctccacacagattacaatctaatctaagcttaaagccctaggttagttcattaagtcaattttgtgcaggccgtctccgtcaggcattaacggcagagttttcggcaaccagtgacacattgtattccaaactatgagtgggttcccttgaccgaaggacttggcagtagcagagagactgagctacccgtcacacctcatggatgttatatccacataagcttcgcatggatagttatgtctcagcttgagttatacgctagtagtagattagatcataatcagaaatacatactcactcgggacatcgtatgagaatatgagaatatgtgatctcgcatcttagctggcatctggatatgtttctgtggtcttgtatagcactataaagagcacatattcaactatgttcgattacattcagctcatagttccatagtgccgcttaatgtccaatactacatactccatagcccagctggcacgaggatagcgtgcgatacttctactttcgacgctggggtaccccatgcttccccacgattggtgtttttgccactttggtctttttttagtatgttctctgataaagaccgctttatttcatatattcggaggggaaaagaacctcatatactttgtctaaattgtgtaacccttgaagagtagcccctgcgtgttttgcatctaggaaacttaatgtatcctacccgaagaatatcctttgaaagatttcacccgcgatgagcagaaagaccagagaaaacttgatgcagcgtactcatatgaccatgatttcgacattggtccctaagtggtggcatgaactataccgatgatttgatatctccagaataaccccccaaatatgaacgtgaacagcactaatattgtctgaaagccaccgatacacctgaaactccatgcaaatgactgttttgctttgattgtccaatgcagtcgggtccgtaatcggcaacggtcctataccgtccccgaatccaagtatcacggctcgcttctactccaatttatccaggtgttccaatcgcgtgagaacaacctgcttgcttgtctcttgaatctcgcccgcgagaaagacttcgtccaggatagcgtagacctataaatccggcacacgtggtcagtatcacagctcatgcaactccgatctcacacatgccgagcagtgcattcgtcccggcgacttgcacgtaccttgtagaaattgaagaccaaatccagttcgcacacattgccgaagaactggtccagcacttcgacgaagaaatgaatggcctcgagataggctagctcgttgtcgttcgcatcgacgcagacgcaaaagaacaagccggcatatcttcggtagacgaccttggtactccggcggaactcaacaaagttggactggtatttctgatctcggggggcgacgaggcgatggacctgaacggttgtcggttattagttggatgggaactcggagtaagtgcgggtgcgggtggtattgcaattgcgacgaacctcgcctttcagtttgactttctcttcatcctgtagcccagtgtcagctcaaagtcccaatttcataccgactgatggattctggcaacactcacactgtacggtgaataccatttcgccaggcgcgttttccccctataccgtcattagtgtcgaaattgaaaatgacccgcgcggacaccactcactggcgattctgaaccaggataaaggagaggaccattgttatagaaagccaggatgttacctggtcagcatttatgaaaccactcggagggagtgttgcgacaagctttggatggtctccgctgctcccgttatcgaagctcccctctcatcttgcccggactcaccgcctagatggattctatcaggtgaaagcagggcatggagaattacagcagactattctactaatcctcaagcaatttagttcccataagacattcaatgcatcaactcaactagtataacaatatttgcaaaacatagagtatcaacagacataaagcgtagaattcgttaacagctcccatgacagcccggtgtaacatgtgacaatgagtgacactgcacagtgacggaataagatattctggtttgccatgttccatagcgcccagcagccctcaccccgagctcattcgattgaaaaacctcgtcagacgagtctagaaatactccattagcaaccaagtaatgtagcagtaagaccaagagcaagtccacgaaagaaaaaaaccacataccgtatagctctgtggcctaggaggctctttcggactacccttctgactctgcgcttggctctgagcctgactctgagcctgactctggcgccgagtctggttctcatcctcagactcatcttcagacccgtaatcctcctccgaatcaggataccaccgttccggatccccattgtagacaagataccagccgattttctcaccgggggcgaggcgatcgcgcaattcctccagcgccgccatctggtcgtccgtcaacccagagccctgttccacgcaatcgatattctctccggcgccaccaccacccccgtcctccggcatctccaggacccgcgttgaaatatacgcatggtcctggctgacggtgccactcgtctcgtcggccgggtcatactgctcgataaacgacagctccggcagccgggtcaccaggtccgcctgtgttttgtggaaggattctgcgataagttcggtcgtcagcggttgctggatgtattccgctgctgcttcttctaggttgtggagtacgatgtatacgcggatccccgtgaacccggcgcggggccagcggaagccgtggagcatatagactggcatgatatccgggtcttttcttgggagccttgtttcggggttcgggagggttatcgcggtatctagcgaccgctagctggggaggattgtcagatttgcaggggattcggagttcatattaagtctgtgtcatggcgggtggtctatcgacgcgattgggttttgcgggtcccgtgcgtttcaacgggagttccgatttgtactgctttaatgcctccaatgaatgcgtgggattcgagattaaatctatgctcgtgtttcattggattttaggtgataaccccgaaacccacaggtctggagaagatcgtgccttgcttctatcacgtgtcatattattagttggcagtagaggctcttggatgctctctattatacccaattactgcattcacaaagcagaatgtgctattccaattattctctcggattcgtttttctctcaatgttggaaatacgaactcccaacctccgagttccgcagaatatgacaggtcatattcggggaaccgcttgatctaatttaaaatctgtgacttgtcgagccagtcaattgcagtcaaagcgaatcgttaaaataggacatttgattcattatgcagggctagaatcaaaacgttcgacctagcgaagccctgtctaaggcactgaaaaggaaaccgacatgaaaaatggctaaaatcaagacgctgagtgccgagttctggtgaatatcgagatagctcctcaatcatggtctcctcttcaaatccgcaaatctccgtgtcaattcatccagctcgggtatcccattgttgttactattgctcttggaggcaccgtcctcccttgagacagcagcggcttttccctctgtgccgggaagcttgactctgggattgggattgtctgtcctgggagctggcggcgcaacgctgacaggacttcggcccgcagtgagtccacgtggaggcgtagctttggtcaattcactggtctccgaggcacgtctcgcttcagccaagttcggcctcagcgccgagtccccttgctgcttgccaggagtttgcggtaattggggttcctctgcatcaccatcgtcaccatcaccaaggtcatcaacaaattctggcggcgcacttcccaactcttcttctgccccatgccactcaacgtggtacgctttcgcaatctctcgaaggtaactctcaacaagatcccgtcctggtgggcgcacacgcaagcccttgagaagccggtccggaaccttgacagtatcgatcttattatcttgcgctagagtcataaactccttgccgtatcgctcgcccagcatagtacgaagcatagtgaattcgcgcacctcgtgcgggaagcgatgccacgcgtagaataccacagtagcagcctcgtcaagcgcagtatcgaggtaggggttatcgtcatccgcaagcccatcaccagagtcatccgccggactaccagatcctgtgataggcgcagcccgctcagcctccttcttttgcgctcctccacccagccaagagaacccgaatatcgagccagtgctttccccagcgcccttgacgcctgcagtggttgataccgtagcaccggcttgttcttgggtgcgcttcttgagcaattccttggcgcgaagtctggcgcgggtcccttggtcgctgaaggccatctgatccaacacgtttgcgcgcgcaagcagcaactcacagtagagctcgaccatctccattacctctactgcgatatccgttgcaatgacattttcgactcggatgcgcgctgatgcatcgcggccttcgctgaggagctgggagagttcacggcgttggacgactgaggaggctgtatctttcttctgtaggagacggagacgaggaataagcaggcggagggtggaaactagtctggtctttgattccattgtgtcagttatttggtttctgtcagacgcgcttaggagttgcagcaggcaggcgttatatgggcagtgcggggtagtcttgggagctctaggtagcgatattttggggaagtgccccggccatgaaatgcatatgcgaaagaagaagaaaagtaagtgagatcatgatgacttactgtttgcgccgagggaggcattttggcgtggtaacttgttgaagagaagatgaggggggaaatggagcccgatggggccgagagaccttggggtcaccactactccatcgggttaccctttgttttctcacagtcgaaacttgaagaatccaccaaattaaaccaatgcaatataacctgttaattaggcatttgatgtgttctcggtgtttcaaggagttctgggaggtccgcccactcccaaggtcagcctcggcttgacctacagttctaccgcaaaagttgtacaaagttgcctacatagttcattcaacttgacaacatgtggctggttccccaattcctgaaaaacctctggtgtaggggttcaaacgaatatcctgtctttcccccgccagagcccgaagaactcctcgctcgccctaatgtctaccgcgaacgcctcttccaacgcatctatcgaactcctaaagacaagctggaagacaccccactgttttcactataccgactctatgagagcttggttttgaacgacaacatcggcctgcgaaacgaattcgaatatttctggtacgcgaagtggccggtcgtttctattcctgatccacaggacccctccaaatctcgctacgcggttctttctgctatcccagcctttttagtcgagtcatttaaccagcgtatcgagctgggtctcccacggaaagccgaccccatcatgtcccgcgaagaaatggagcagtaccaaaaggaggacaggatattcgagtcagcgccagagtggacggaccaggtggcgcggctcgaagataccctagtcattccacatgataacgaagagattcttgggtcgttcaatgataaaagggctagtgagcagctggcagcaaaaaacatcttgcattggcaaccacatattcatctcatttgaaggttgaacatgttggcctatgatttccgatgagttatgacgcgatgaattgttactctcatatatatttcgcttagtgaaaatcgataacaattgcacttttgtcctcgcttctcaacacacttggtgcaacggcggcattggcgacgagtgtttcttgcggtggctcagtgtttctccctatagtgatcttgctccatatggtctgtttgagagcccgaactatatcgtaactttcccatcgcatctgtagcccatttacaacgtccttgattccatcgtgctggatgacagcaacaccgaatgccccatggatatgtccacagacaaccatcttgggctttactctttgtatctcacgcaatagatacccatcccctttaaccttgatctttccatccggtcccttttcgctatcgcagtcaccatatagagctggagggccatgcaccaccagaatatcagtattatcggggatctgcccggtccgcacgtcacggattgaaggatactgaaaggcccaaaggccaaactccggcgtcattggagatccataaattttcacccggcgcacttgctgctccccggcagcgggcactggtatttccagcgtcactgcttcttcttgcaaataatgaatccccgtccaatccaattcctttcgcttcacagcactaattccctcgcgcgaaagaaacttcatctcgcttgcttcatcgaggataagatcatggtttcccgcgatgacaatcttatgggtgtgtggctgagaagacagccagtggagctgtgtttgcacctcgtcaaatgtgccatgggccgttaagtcacccgcgtggactagtatatctccgggtggcagaggaggggttgcattgtgcgtgtctgatatgcatattatgcggattggagggtgacttgggttatttggaagaggaattggtgttgtcgatggtttttgtcgtgcagactgcgtggctcctcggaataagatatcccagaggggctgtactaaacgctccagccatattggtggtcatgataagttgtatgggaagggaagtagatggttgttcatttggagttttcctccaactaaccccctacaacgttgaccaaatgagggggataattaatgattctaaagttccccgtgtcacgcgcggcgcatgtgaactaactagttacgtcatcgtatcagaagggcgaactgtaactatagaatatctattgtgagaacagcataattctcttgagcacatcgatgttcctaaagatagattgagggttggatcacgtctatcgtagaaaagacacctaaatattcacgaacccgacaagggagcatagaccaatcaagaggagatacatcatgaaacgcttatagtaccatatccctcttctcaccatcatcctaagtctaggctgatcacaagacagattaggaagagtagaaagcgaagcttctagagaaattgaagtggcgaagagagagacgataagggtatagatccgattagagtaggataggtagacgatgctcctttgattgatattgataatcattctgagcctattttgccaaataatggcacctgggtacggcccccaggcaggaagttgggcagtggagaacataaaagaatgaggcacctaatgcggctggtgtaacccatggggtatctaccacaagcttcaattgatggtaaagaaggttccttgatgcttgattctaccgatcaatgtctgctcaaaactgacgattcaatcggaggccatcataatcaagcaagcctcatatagaagtcaaaacaattatacttttatacactttattatgtgtgtcattctgtgcctgtggtctgtgattcttattcttcttagatcttagatcttagatatattatagagcgatttaggttatattcaatgtttagtatattatatcagaagacagtcacgacccaaacgaccaatatcaaatatccaccgcgacgatatctccaagccttcttcctggtcccaataatctttcataatctttgctgcattgacaacattcaaacatctcgtagcagtccaaaacttctctaacgattcaaccaggaagtctttctgggcgcgagaccgacattccaagcccgccacgaagatagcccacagaatacatttgaaaagcgcctcctcatctttcaaaatatcaatcagacccaacagctcaaagactaaatcgtcctgcactgtgattgtttccgtcagtacatccagaatgcgtctcccatatatcaaagccccggttttgaaagcctgcgataatgtgcagagataattgattctttctggggcagactgtcgcagactcgaagcccaggcgtaactgtcaaagttttggatgagctccagcatcgcggtggtgtcttggatatgtgtttggagagcggcaccgtccggcagctgttctgcgatggcgtccctttccttggagagatattgtatcgccgacaacaggaactctggacatccaaggaaagattgctcgattttttcctgggattgcctttctgcttggccgttaaatatgaattctgacagtagttttggtcgtaaaaatgttgccccgagcgtctcgattctattttgtaatcagtcagtctctcgcatggctttataccactaggcctaatctaactcacaaatgaatctgattggagataaacccccggatctcctgtaccgtctgtccaggtccatcattgactccagcttgccactccagtagcggctggtaggatgtaatcaaactcttagcaccctcaagatggaaattccaaccttcactcccagattcgaggagatccagaaaaataaaaagaaatattctagcgacggttgtgtcgccttttcctattgttccgtcaccaagtacctgagagagagcttccatggcttggtgtttgaaaagtagcgcatcgcgattggcattaacgaggccaggagatgtaggaggttgatcttgatggaacgactggcctgtattagcatggtgccgcgccgcgagagcaagtatgcccttctgtaagaccgggtcgttcaatccaaaggagagcaagctccggaatggattcctggcgctgtcgtatacaatgaacaatttgcatatgtgtctgttatctaaatgcgatgtcagctattagtaccctagtgttagctgtttgcatgcggatcttacagtagtctatataatatttcgaagtttgatccaggcttgacatatgcggatcttgcaaggcagccggcagcatactaccttggaccagcgggcggggcgatgtatttggtgtcgatagcgcggaatcgatagttctaggagtttgcacaggagatccatctgatccatctgatatactctcgtacgaatggccttgcatctttccgcgaatcgcaacacccttgacccacctcagaggtctcttatcgaagcactccaggtcggctctttcgcacttggtgcatggtgttccagactggtcgcattgaatgcggcggttgcgacatgtccaacatggatatggcatagggaatgtgcaatgtggggaagaagggtatcagatactcgagtcgggagatatgaagccctggagataagacttgctgactgagcggacccgtggaccggctatccatggatccatccaaccacatacctgtcgacggcaattcttcgccatcacgacaatgtgtttgaacttgggtcttccaatgtatcaagttcatgaattcagcgcatagtatatgtctgtcattcctgctctttaagaagacaaagagaaataccaacagcacagaaaaagagactaaagagatccttcaaacgtcaagaggatattagagacgatctatataaagtacctagacccactgagaggctagtcatccctcataagtggctattcctttatattatgcctatatgaatattggctttctcttccacaaaacccagtgtatatagaatggccccgctatgtcccctctaattgataatctaaacccctttgaaggccacattgaaccatatagtaatagaccgctgaatcgaattctgctagttcagagcaatatgtcgcaagactcccagagtatttattcacaccacaccacgacgtccaaagacagtggggcttaacaagattagcaacggagagaccgagccatctgagacatgtaagacctaagcaaacagacttgcagcaacccccgtcctctcatccctcgaattgctgcaaccaatgcgggtccgacggcgcgcagagagagacaccaggcaccgtcgagccaatcaagcaccgcacaagcgaaatcggacccaaaaaaagcgagagcaagccactataggaaattagacctagacaattgaggtccgtccatgagaagagagtaagttctccggtcaaaattcccaaggccgtatatttagaacatttagtcttttgattggtcgatccaccagtcattcagctacgctgattggcccgctcggttcctgacatcattggcgtgggagtctgtcgccgctatacctatttaggaagaatatcacaactgtatggtcgattttagcaatcccttcgcgtttcagtattgcttagccgtagatgtgaggctttagcgtgcagggtatgcttacttatataactggcagagtttgcccactgaatgtagtctactgtttcctatctcatcccacaagaggtacttcgaatcgaccaacacgaagaatctgacattgacaccttccaccttctttgactacagtatgcgcctatctactctcatattatgccccttatggccaataactaacgagacactttctcctctgcagcctcttcaaaccacaatgcctaccatcccacccacgatagagacaacaatgacacaaacatccacaatcgatagcgctacaagcttgctcaagcgtagcagcatgagcaaccccgacaaataccccctctacatcttcctcatcctcgccggatgtattgtaggaggagtcatcgggttcagcatatactccatgtactacggcctcgacgattcaggcacgttcaaggacgtgggctacgagcaacgaaaatacatgcgcgagaccaggcagcggactatgaacatgctagctgttgaggcgaggagacctgatatgattgttcccgtcggggaattggatgcttgaattgcttgggtctggcgtttggggatgtctacatgaggaagggcctctagtagttaggtatggatggtttggttcgatggatattatatgtaagcaactggcaattatgatgtatgcacccgctatatatatcggaataaagacaggttcaatgtttgtgtatattcaattaaccaagtattccaaggacagtgggatgcttgacccgaaaaatcaaagcgaggacgaacgatgagagagcgctctgtataatcagcaaagatctgtctgagatctttaccctagtggtaagtattgacgaataaagaaaatgaacactgtctttcaatgtgcaatcaaaaagacctggttggttccagcttcaacaagctgtcacatgtgatcaaaacaaaccccctgcataccagaagcaataagagtaatattcaacaagctgaaaaagaagagcaatgccgtggagcaaagggatataaaagtcatgaagcagagtaggaaaaaaagtccaacgttgagcgtcgtcaagaaagggcatccgagggatgacaagaatcgtaaaaatggagattatgtagaagaagaattaaaatgtgaaagaatcgaacaatagatgcccgcgggtttaccgcaggcagatatagtgcagaagaatgccccaaggcagtgtttgtacacacccgtacatatatgcaatattgtactctcaatatagccgaatcagtcagcgctgatttagaaattcacgacaatggccgcaagcgcaccgaatgccagggtcaccatggagacagtggcactggtagcaccgccagtggcggaggatggggacgcagcagcggcggcagcggccgtcatggaggccgctttgatatcagcagaaccagtcagaacgtgcggctggtacgtatagcttagtgtcaggctcgagttgggtaggcgcgcgctggggctagtggcgctcatgataggagttgtggtggagatggagctagcagtagaggtggagatagcagtggaggtggagctagtaggggtggagctagtagtagaggtggagctagaggtcgaagtgggagtcgaggtcgaagtcgacgtaggagtagaggtggaggtaggggtgggtgtggatgtgggtgtgggagtctcagtggtgctagtactagtgctggtcggagtaggagtgggagtcgaggtgctgatgctggagctgctagtggaggtaggagtgctggtggaaacctcgatggtctcagacgaggtgctgccgttaccctccttctcgaagacgataatgtgcgcggtctcgcccttagggatggtcacgacgcaaccggtggcgccgccagcgccagtgaagggctgaccgatcatctcgttgacatcgttgacagcagggtcgatcttgcagggcaggccgttgcagccatcaccctcacactcaatctcgataccgaattcaggcttgactttgcggaaaggcgtggtgggttccaagtagatggggttccaaccgatcttcaggaaggtgttgccattctcgtcggtgttggcccctgcggtatacggggaccagttaccgacggggttctcggaggtaccccagacacatccttcctccgcggtgacaccaggagcgttaatatagtactgggcagcagtggagcaccagtaggacatgccgggcacggccaggtcggccagctcatcaaccatggtggggataagcatggcctcatttccaggcaacacagtctggcagaaagagacagactttccagccttattgtgggccttgagaacaccagtggccgactcacagtagtcgcggttggggaagggtttctggattttgccatcctcgtcacagtacagaccacccctcatggacatggggtacgagtaggacgtcgcatcgggatcccactgcatagacacctggccgggagggcaagcgtaggggcagtagttgccaggtttgcagggctcgtcggggctcatagcccaaccggcgttttgctcttgcggggtgatctcaaccaggccagcatcggtggggaactcgcactgtccactcctcttttccaaaacaacatcacgagtctcgtggtgatggctgtggccatggctatgtttggcggcttcagcgctcgcaatgagggcgacaagcgccgctgcacggaaggatgtgatctggaacttcattgcgttggggaaaagactcggcaaattgataatataaacgaatgtatgtatgaagcgagtggctaagtcaaacgagtgacaaaaagatacggccgatggccaagggcagacacagtgctcacagataatgaaggtcaagacaagcgaagggaaacagacggggaaagcaccaagaaaagggacacggcctctagggagtcccggctcaggtccacgagtgtgctaacctaataaggcgttagatctgggatgatgtgcgcgcaattccggtgcagagcagagcagccccgactttcataggcggctcgtccgtgattgaccataattcccataattgcgccctaaactggaaatatgggcgcagccttggacccccaaaatgctgtgcccctgaagcagactccactagtggacagccactagacacttagtgtcaggggcaatgatagcctgcagccaatgatgaacgccattaccccgatggttcctgcttggcagggggaagggccaataagctaagagatatgcattttgtggagttgtctctcgaactctttcaacggcaaaataaaagcaaaagataagtgttcaaatgaagaggtgaagaaaaggaggaaaaggcgtgcgcaacctttacctgagaaatcctgtcacatgacacctcaatatccacaacatacctgggtaactaaccaactaataaatgtggcatgagaaaaacccaaattaagtgaactcagactttaccgagtacatcgtacgttctgcacgagaagaagaaatatccaccgaaaccaatgaatgagttaatattcccaaaatgggaaatattgctcatttagcctagtacccgtcaatcccaatcaaacccaccatactacaccgttttaaacatgttgatcaacacaagtgggctctcttctctttgataggcatggaatcacatggccaagaaattcgaatccttagagcgtttgtcccggctgccaatgtgtcgctctgtggtttagacaaagcttgacctgggagagtatgggggttttcatggcaaagcaagcaattaacaagatcgccgctaagatcactttgatcaagggctccatgagacgctatgtccaagatccgccagagttgccagttgtaaagtgtgcattcactgcattgtgaggatgcccggtatcatccggaatatcaatgcaagaagcatggacctgattagtacgtgatgcaggtggatgtcggtatcttcgatggcttgggccaattatatcggattataaaagtcttccggttagttagttacgtcgtcaaagaccgagcgactcttctttgtacttcttcaaactgcgatttatatagcttagtacctagccctaagctgcggcgatccttgcggcgtctacaatcatctcctattgcaacgaatgctaagagtgaaaatcaagaacggcattgcgttgcgcatgataaacaggatgtcttttttgagtttgctgtaaggactgttgatgttcctcgcatggtgagtatccactcggcctatcacttggatttcgcggggccaagtgcatctgacaatatatgacagatcgcattgacacggccataccgttattttttttggtgtcttttgtgctgcttttcggaggatctttatactactttccaatggatttgggtgctaccattatgtggcttttataatgaaaaaaaaaaaacaggttcaacaatgccctagctattgcgacaatccaaataaatgaaagagtctagcaggtaactgccccagaaaatttctcagtcaccttttaatacaatccaggcttcctccttgtgtatagtcccatcgctgtagctaaatcttgcaatgcaactgaaagttaacctccctcattaaagcggcggcagcctaaataagaaagaagagggctacaacatacagcgatcccttattaagaatagaagaataactggtaattcgcccagtaggtttttctttcctccttggggattatttgaagctattcacactgctgacccaccttaacccccacccccacaataatcttatttctcttttacgtgtgtacatacagtcagactggagggaaggtatggaagatagaaaatgtaatttgctcttagatactgcatcgtgttggacagggctccttggcctaaagttattttggtttgtattttcagatatgcatcatgacctttcgttatagagctgcatcatcagacatcaaaaattcacaaacgaagctattcgccttgctgagcttgtaggtccttccacccagcaaaagccaagacatcatcacggtctctccatccccaagcaatgcaataatgccgtgcaagcaattgccactcctccatctcatccagcatctctagcccagcaactctttccttctcatcttcgttaacccacttcttccaaataaactcaatatcagcggcagcctggccatccccaaagccctgatcttggaagcggtctcgctgcgcctcaagcgatgcatacctagcgagagtcttgagctggatgccccgcgccgcaaggttcgacaccatcgtacgaccaaaggcatcattgggccgaataggctcataaagaatcaacccaagcggaggaacatttacccgcgcctcctgcaagatgtctccgggcccggatagtggatgcccatgaccaaaaaggcgttgcgtaaagaacgcaactacctgctccgcttcagtaggcgataggtagaccaaacagcactcggagatcagcaaagtcggcaatcccgtgtccacacctggcagtgctccagcagggtcactgcatgtcgacagcgaccgcagatcaaccgggtggacatggtacgagggcgaatggagcgcgtcccccgcctccgacacagtaattcgagtatccttttccgacgaagcctgcgacgagtcaatcccaagcgccctctgtagcaaaggcgccgatctaatcgcgcggatcttttccgctgtgttgacggcgaaatcgagctcgtggtaaacgaagtccggggtttggcgcgacgagagaagccggaagacgcgcgtgtcggacccggcacctagagatatgatctgtttcttgtgtgtattttccggtgagaacgggccgaggaaacgcgccacgagctggtcgatagctgttgtgcgggcgtaggttcctaatgcgcggggacgtgtccgggtcagccgtatgctctcttgtcatcgggaatagcgtagtttgaggggtcgggctcacctctgttgatgattggcaatctacgcgtcgccgacccggcaggtgtcaatgatgccgcgtacacatcctctagatagcctagctcgacggcgctgaggcgggacacgcttgcgtcattgtctgtgccttggacgatgcggtcttttccagaagggagtccagcttcttctgtgcgacttgtgccacggcctcggcctcggcctcgtcgtagagtgtttaggttgggaatatgggaggccatgaggaatggaggaagcttggagcttgagctttcgtggtggggtagctatccgggcgtggatgtcgcctcttaacttcatacccgatttctctctcccaatattaaatttccaacccagttccagaatttgtatcttcgtcgaatcattcttatcgcatcctcgctcctacgtcttgtttgatcgactcggtgactacaacccgttcaggtagaaagttgtaagattcaacttcttacgttcaacagcgaagaaaacgatattataacattgaacatctcggtccaacatttagtacaactgctccctactgccaataccaccgagttactacagagctacgtctgttcaactccccaagcacaacatccctggtagggctgccactaaatctacctatgccaacttactcttgacaaaggcaatagcctgtgcgccatactcagctccataaccctggtgggtcgcggcgttactcccgttgcagcagtacgggtctgtggagtcgcagtatgattgaatcttactagccgacgggcaaaagaagccagaaggacgtgcgtcaaactatgtcccaagagttagatgcaaggcttccaagttcagggggaatatagggcagtccatacacctccagcagcacaagttccaacatcatacgacaaccctgccacatacagcgggtcacccatgaagatggctgccttgaccatgttcacagcggacgttgacagctggaccgcgctgttggagtagccttggttggggacgccgccgccgcacaatgctgcgtccatgatttcaccaccctaaagcatcgtaagtacatagttggtctttcgttttgaatagccgaggaaatctaacccacctgggaatatccgaccagaacaagcttggtcgatggacactgggtgttataagagttcacagccgaggcgacggctgcaatgccctgggcaactgagttggagtagctcacgctgccgcaggacgattgtccaccgcatgcagggtagctgatggcctcggccgtagagcctggataggcattgagaaggccattgacaaccgtgatggacgagccgtatccgggagatacggtggtctcgcgtgcaccaaagatgtggacacccgggcaggagatgcgtttctcaatttcaacctcaaccgggacagcgagggcgccgccggcgagtagggagaatgtcaagattttgggaatcatgatgtcaatggatatcaatcagaaaagtaaaataagcgatttgttaccttggatatgctcgggtttgcaaataggtttgatatccagactccggagaccacggttgctttatatagatctcgaatgtccccttggcaacagaaaccggaatatcattgtattttgccgtatagcaggccatcaagaaatgaatatgaccctttggaccgggcggggctttttgcctaatcgttgtctgattatgaaacctcatctgcattgtggcagtattgccaggttcagaatggaacaggagctacataattaggctgaataaaccggcggataggcctaaaaagacacaccattggatctgatgttggaaatgtgacccgcctgcatttaacttaagccagttctccgcgttatttcaggcaataaatcgtcagatctttctggggtatgcaacagggatcctcgctctgaccggtttggaacgagctatgattcttcacaaacatttcggcaaaaagggctatattcattcccaggggtataggcagatatagagacctgcagcattgacatcgaagatagtcagttcggcttcccaatcgggtatggctcgagacgtgcttgtttcattggtctcagctatagggtccagtgtgcagggcataaaggtacatgtctaagtggtccttttattcctgatggaatctgaaatactaaaagtaggatcatggaatacttttttcacggctatcggaccgaatctgaggaccgtggtctatctttgtcatgtcatgtctcttttctatgtacaagtgaacttaaacaaagtatctaaacataaacaaagttgtttcggcaaagaggacaagtgctctggttgctgctcttgaaccagcggaacagacagaccgagtggaaggtgttcttgcaagtggcacagcgcttgttcggtgtctgcatatctgttgagatgacagagtaacagatagcacactcgctctggcccttcagagcaccttggacgtttcgtcggaaggccagcaatccatcaactagattgccatttgcaaacataataactccctggatcgtcagcagccagctcttccatttcttctcatccacaagcacgcgactgcgaccgacaaccaacgcgggttgaagcgggtacgcgggtgggagagttatggaaatagcaactggaggcgactcttcatcgactggaatgctggcaatgatttcgcctgtcttcgaggaaatcttcacctccaatgcgcgttcttcgtctgcatcctgggtggcaatccaatcggccacgcttttgagtgcatcttcgacaacaaggggggatatctgggaacggtattagttatagttactcgtttagaagggtccaatatcaaaaatactcacatatttttctgaccaggcttccaccggacccttggtgcgtttcttagtgtcaatccaccaattcttggtcatgttggcagtgtatctcaggcaaagatagtacagatgtaccaggagccactgtgtctccttctcggcactctcggactcatctggctcaaatgatcgaatatcaagtttcgatgcatcgatcatctttccgtgagatttctgaaggaaatcaaacgtgaattccagcaatgggaggaggatattgttctctctgatgcttgccgtgtagtattcctgcacagggagcgactgatcggactgttagcaagtttattttacaatttatcgtaagagtcaaaacttacagcatttgagaagtggtcaaataccaccttccagctgagaaggtacgcccgcatactggtccacatcttgtcatctccgtaagcagcagagaccatttgcattgtcggaggctcaagcaataaagacacgagctcatcaggaaggctgactgcagtctttgataaggcaacatcaaaagataccttctcctgcacatgggggatatagtgatggagaagagtgtaagcagttcgctgaattgctcggctgtgtgcagttagaagatggaatgtttcactgacatcctccaatttgtcaacggggatagtgttaatcaggcgtcgtaataagtcaacagcaacatcccggggttgatggaatgtggttgaggaatctatattttgttagacatatcagtgatgagagaaacccgaagcgcttaccaaatgtgtcaatggtggaggccagggcattgaaaagaccggcctttcgatctgaccaagcatcttggacatcgtcattgctgtcactttccgagatagacttcaatcgtgcgaagagtctgaaagatgacaccagtaatggtagaccctcttcacctccgttggttccccgcaagacagaatttagaatgtccatgctttcttcccaatgagatccataaatttccccaagagctggaaggacaagggacaaggttttgatgacttcggatttcaaaccaagaaacattgagtcggattgcagacattcaatcaagttcttggtaaggaaaaccaatctttgtgtcggaatggtggagacaacatcttcttccccagacaatagaatgtttaacagaaccagcttccgcaatcctgcgcaaagttagtaccggtgctatatctgctaatgtgttatcagacacttaccaacttgggaaacatcctggggcttgagtccagtggaatcggcaactagctcattgcagattctgtttccgatgggatttgaaagtatggagcttcgcaacactgcaaaccacgatgccgagcggatgaggtttgctgttcgggcctccctgcagatcttcgcgacgtcctctgaagatttggaaatttgcaatgaatccgcaacagtcattatcttgacgaaggcttcgccgaccctatagtccaagggagatgtaccctttagttcctctagtctgatttcccagaactcggcaagcgaggaggaaacggtcttctcaggtgcgaagctgactggctcattgtcacgagtccagttaccgagcacctttcggccagcaaaaacaatatccatgtattcttcgcgctgatcagccagctcgagacctgagatgccgttgcaattctcaatgctcaaatcgtcatctatcagttgaattgctaatggcaagaaatggaacaaagtctctaggtcgccttggtccaaatgtttccatagctcagaagtagagagaaggttgatggtgtagattgccaggcggaacgcagaagagcgatggtctgaatcgcgaggaatggttggccataaagccttgaaggagtcagatagctctcgctggatcaagtgaacaacgcctcctaatggactggttatagcagtggaaggtcgaggtggaagttggagaaagggggtcagggatttctcccatgaatgacgagagggcagaatatccttcacgctaccagtggccgtaagacctggcagcagttcatttgcgatagcaagaagtgattcaatcctgaaccaaagttagcacaatgtcctacggaatatagtagcaatgaaggacccacgataatgattcttcatccacatgactgaatccatgttggagaatttcgatgcccgacttggcactcgtatcaccaataccagattccttcaatgatttcaacaacgcttccgccaagcttgctacctcttcagatggtgactctgtgaggaaaagtagctttcctgctaactttgacccatgagctccattttggaactcccgaaaggaagatggtgcagacttcccaatatgagagagcccatgcaaggtatcaaacactttatcttctgaagataatgcgtcgatcaaagataagaaaatctgatccatcaattcgccatgtgatgttttgttttgaagaactgcagtgatgataggccaatgagcatggcttccttggcaagctttgccaagagcccgcacaacaagtgagttgagcttgtctttctgctcaacatcattgaaatcgagagaagaaagtaagctttgaagtacgtgcacattagactgttctggctcgagggccaaggctcgctcaacgacgttctcgaaactgaatgcaaatccatcccactcccgacattctaagatgatcgagatcaatcgatcggcagatggtgaaagcaaaagctccggtgcatcattttgcacaaagctttgaaggtctcgggattttttcgcaacagatggcaggctgcgaacacattccagcactgtgccggccgctccatatggtttcccattacgagtgcgcagtacttcgagacaaccttcgagaagggaagtagttgttccttcaaagacttccgatacttgaggctcgacctcggtatctgagacccgtgagagaacagcagactccaagttcaagaggcgtttggattgggcacatattgagtcttgagattcacggaagtcctttgattgctctggggacgatagcttcacagcttctagcagtccatcggaaaggcatgtacacaatgattgcagttcctgggcttgctcggcggaagccagagtgaaaacataatccacacaaatcccttcggctaactcgtccggaagtgaccattgagtcagcttcgggtcaatttgcacatactgcaccaccaagggagacagtctctgtgtgatgaattcggatttttgctcctgggggaccaacgttgcaagccatgctcctatatgggtataggatttccatccgatggcaaggtttgaacgcggttcttctctcgagttgaggccttcttgcaaagcctcagtcaaggcaattgcactggtagaagtgattccatggtcagcagtggccttgtcagcacctgctagtacttcttgggggatgattcgaagcaattggtctaaattcgaccaaaaattagaatgtccgccctgggaccccttctgcatgtactggcgcaatcgcttcgaggcagatgatttcccagtgtagtcatcggtccatatttgaggtctcagcgaagataataaaaggagggactctgacaattcggcagccgatccgatttgcggtagagacaatgattttccaatgatggctgaactgagagtcttccagtcaatccatccaggctctcgagaaaccgcagttcggagcaggatgtatatggatcggcgaacatatggatcatcgtggtgacagagagcccacaaattcttactggctaacaggttctcgatttctggtaggttcttctgcaaatcttcatcggacgaattgcctagagacgttgaattgttagacagggaatactgcaagatagaaacgtttaatatacctagtacgcggttgaaaagcaaaagtgcagctcccgcaacacgggcatactttccttcagcgtcgtctctcttcactgtcctttcatcactcaatgtcaaggctgtttggtgaagaatgacatcatctacaaagtccaaaatggagctttggtagattttccacacgttgtttcttttttcttcggttgtgaagacttttgtgaacgattcaagggcggcacggtggaccggtcgatcattgtcgtagattcctgcgatccatgctccgatgattttgggtaaattgggcacgatccgcttcccaacaagaccagagattgttccttgtataggatgggcaagttgacgtacccggcgcgataaatcaatcgagagtctgggataaattctgacctggaagaaaacattgttattacttagtgtttgtatatggaagcaatctagacatacccatgcatctagaaacccgtcatctagtgttcccatcttctctttcaatgttgaaatatggtcgcgcagctcctctagagccttcaatcgtgtaatgtcatctttctttagtaagttcttgaatgcgataactagttgctgctccgtaatgcgagaaagatctggcggcactgcaatgtatgtgagagcggacgcctcctttccctcgccagagagaccaccagagaatcccccaaatgatccaaaggcactggcagcagcgcgactgctggaggcctgggatttgaactttctgctcatgtggggtatgaggtccgcgggataagcaactagtgggggaggacctcgaaattgaggatttggaaaggcttcggagagagcaaggcgctctgttttcgaattctgagtcagactgtgatttgaatgcctgtatcactcttccattgcgtcaagtaccttcaatatcggatctccaaaagatccgcgggaccaagatatccatcacgtgagtttgtgtcatcgctgtcccgaataggacaagcgcgtaggcggagccgcgaaagatgagcgcgagctctcttctcttctgattctttgccctcttgcgttttgcgtcggagcccagccaagatgaagttcttcattgagtatgttccctatatatgattctatccagtctccaagctgaccagtcagtgatcttccggtgctgtttccttatcctcgcatctaccccgaacaatatgcctacatgtgcgatctcaaaaagaccctcgacgcaggaggtcactgtgtgctggaaatgccctcgggaactggcaagacagtttcactattgtcgttgatcgtcgcataccaacagcactacccggagcaccgcaagctcatctactgctcccgaaccatgtcggagatcgagaaagctttggcggagttgaaggctttgatggaacatcgtgctaaggagctgggtcatgaggaggaatttcgtgcgctcggcctgaccagtcggaagaacctctgtctgcacccttcggtaaagagggagaagagcggtaccgtggttgatgccaggtgcagaagcttaacggccgggtttgtcaaggagaaaaaggagcgtggtgaagatgttgagctttgcgtataccatgaggtaggactttgttatttgcaatacaacattgaacgagctaacaggcctagaacctttacttactcgaaccacataacctcgtccccccgggtgttttcacattggatggactggcgagatacggtgaagagcacaaacaatgtccctacttttccgcccggcgtatggtaggatatcgagcgcgtattccaccaaaagtgtcccatttctgacaagctctaccagatgccgtggtgcaatattattatctattcctatcactatcttctcgatccgaaaatcgcggaacgagtatccaaagagctctcaaaagactgcatcgtggtctttgacgaagcgcacaacattgacaacgtctgtatcgaatcgctcagtatagacctgagcgaggattccctacgcaaagcgactcggggtgccaacaacctggaacgcaagattgaggaaatgaagagcacggatgaggaaaagctcaagaatgaatattcaaaattagtggagggcctgcaggaagctgagaaggcccgggaagaagatcaattcatctcgaatccggtcttaccagatgacctactaaaggaagctgttcctggtaacatccgccgagccgagcatttcatctccttcttgaagagatttatcgagtatttgaagacccggatgaaagtcacccatgccatatccgagacacctccttctttcctcacccacctaaaagaccttacctatattgaacgcaagcctctaaggttttgcgcggagcgtttatcgtcacttgtacggacgctggaacttgtcaatattgaagattatcagcctcttcaagaggtggccacatttgcaacactggtcgcaacttacgacaagggattcgttcttatcctcgagcccttcgagtccgaagcggctactgtaccaaatccaatcctccatttcacatgcttggatgcggccattgctatcaagccggtattcgatcgcttcagctctgtgatcattacatcgggaactttgtcgcctttggaaatgtatccgaagatgctggggttcaccgctgttctacaagaatcatacagcatgacactcgctcgacgatctttcttgcccatgattgtcactcgaggctcagaccaggcacaggtttcatcttcctttggaattcgcaatgaccctggtgttgtgcgaaactacggaagtctagtgaccgagtttgctcgcatcacacctgacggcgttgtagtcttcttcccctcttatctctacatggaatcaatcatcagcatgtggcaaggtatgggtattttggatcaaatctggaactacaaattgatactcgtcgaaactcctgatgcacaagaatcttcactcgccctggagacctaccgaacagcgtgttgcaatggacgcggcgcgatcttgttctgtgtcgctcgaggaaaggtttccgagggtattgatttcgatcaccattacgggcgtgcagtgctgtgtattggtgttcccttccaatacaccgaatctcgaattctgaaagctcgtctcgagttcttgcgtgagaactatcgtattcgggaaaacgacttcttatctttcgatgcgattcgacatgctgcccagtgtctgggtcgtgtcctgcgcggcaaggacgactatggagtcatggtgttggcagatcgtcgattcgagcgaaagcgtccccaactccccaagtggatcaaccaggcaatgttggacagcgaaaccaatcttagcactgatatggcagtatcaaatgccaagaacttcctacggactatggcccagcctttcaagcagaaagatcaagaaggaatttctacctggggcttagctgatatcgagcgccatgaggcaaagagaaaaacggaggaagcacggatgactagagaggaagtgaataacgggcacccaatggacggagcaattccatccgcatcccggatcgtcgtggacgaatacgacgatgacattgatgaggacctcatgatgcttgatgcgtaataaaataatcttgttctttatatgatgaggcatctactagcataagcagggcgtttggaattgagcatggcgccatttagcacggcgtttccaaggcagaaaccatctaccttacaattgaagacaaatatcttaacgactatcctttggagctatggaagctatctataatattttgagcatagctttgcatgaagtacgggtaggttctttataagctttctagatcaatttcttcggagaagatgatctcatgtaaacatgtaggtatatcattgacggattgcttctgcttcttcggcttaacaactcttttcttccgtaaaaccacctacagtttgataccccagatggacgaccgttgttcggagaccaatcgaaagaggagacgaatctcgaaaagaccgaaaatatttatgctctgcagaagttctgatggaacttctgagttacaggttattctttaaaagaattctcagatacgacggggctactacatgaagtagaagagttggtatcttcacttatccgcctcgaaaatcaccttgtgggcccgcatgttatcgaaatcgtcatatctaccgaagggtcaatcatagggtgtcaaggactgaacaagaagaacttacgcctggacggcctgtgagagcggacgaatatcatgacacatgaagctaggaaacgttagatcctcgcgaaacaaataagagtaggtcaggcaaactcacttgagaatgtcctgcttcttttcgaagaggtccagcgccggaccaaagatacctagcacagttgagcaaaatagccaaagtaagatgtggaattaaacatactccgaacagggcatcggcccatctgtagactgaggttcttcgcgtaggcttcattcccggtccacgggatctcctggttatggacgcccacactcgatatccggccccaggggcgtaacaaatcaaagcccagcctgagagcgtcactatgtccgacgacttcgataacgatatcggctccacgaccatcagtaagatcctttaccctttgacgcagcccttctccgtcttccttgaaattccaaggctccgctcctagactctgtgcaagtgctagtctggaaggtacactatcgattgcaatcagagtcttcggcttgtaatcgagagcaccaataagtgcgcagataccgacagggccacagccaaagaggagtaccgtgctttcgtgaatctcctccggagttaggccagagaaggcgttcagagaggcaaagtacccggtggggaaaatatcggccataagaaccaacttcttctcgtcgatggaggctgggactttgacaagagtcgagtcggctagtggaatccggacatattcggcctgtccaccatcaagtgcaacagtaccgaatagctggcattgagcgcaccgagaggagaagccacgcttacagtagaagcacttcccacagctcgtggtgaagggtgagactactcggtcgcccttttggaagttcttgatgtccgatccaagttcaacaacctcaccagtaaattcgtggcccatgacaaattcgattccggacttttggtggccgcgaaagacatggagttcactttgcaaatatgagcggttgtatgctgttagatatagttctctgtttcttacctgccacatagcgcagtgtatcgcaccttcaggatgacatctgttggatcttggatcttggggatgggcttttgctcgatgactaccttcgacgggcccttgaaaacgacagcttgcattttgcagtatatatttcctttggtttgtgtagaatatgctaggatgttgaatgacgttggaactggaagtctaatttaagtagagatatgcctagtccggcgacatcaccgacggacctcggcaggtctcggatttgtggtggcacgactggaaaacgacaaacaggattttggcataattgtattgaaaagtaacaagacctattcttcaacgatttcgagtgttctaaagaggcctctgtccgaaaggcaaaactggccttcatccatccaatgaagggtatatcaaagccgtttttagcggcgggggggctttttgcggggagaaaagattgtcggccttaattttaaggttgcactgaccgcttttctcaccggctttactttgacccctctattaattctcagtggtacctttgctttgtatgtaagccccatataaaagtaagtcactcatttaaccttaattcaaaagtgtaaaaatccagctggcagaactatatactacctgaggaatgcggcagaaaccaggcattttcaggcaggagtggttataaacaagtaaaagccatattacaacaccctaaggaaaagatctattttcaactagtcaagatgctaatatgaacaggacttttgagttccgctgcaaaaagacaaactccagatcatcgacacatcaaagatgaagcgaaaacacaaaaagaataagagcttcgcataaacacaatatacacacatatgaagggggaaaaaacatacacattgcagaactccatccagtcaaagactatgctacaggagcaagaatgtcgaaggaaccagtgccgacggtgccgacacggccaacaacaattctgctactagggctcttgagattatcattacctctctcgagcacaacgtccttcagggcaccgacagtagtctcgaaactggcccgcgcgaaagcagacgaggcatccttaaccaagccgttacgactgaaggccttgaagccaccagactgtgtcatcacatcaccgatcaaattcaagtgacggttgtcgacggagatactgtgaccaccgaaaacggcatccatttcgcggacgatggtagcgcgagcagcttcgacaccgtacaggttgagcatgtcgtggatggagttggtgtagatcgagtggggcttaatgatatcctggtagtcgcgcatggcgagaaggttgacaccctcggtgaggatgttggcgggatcacccttggcctcatcggccgggacgaagacacagttgcccatgccggggatgcactgaatgacggcgaggtggagaaccttctcaaccaggggaaggaggagaagcttgggtgtctcaacgtcgtactgcagttggatggagcacgagttgcccttcttcgggtcgaacttgaactttgtaatctcctcgaatttgcctatcacatcctcctcgcgcgccttgctgtcttgggcggtctcgtcatcagactcatcctcggaatcggagtcggagccgtccttcatgcgcacgtcgcgagtggccttggcaggcttgctgctttcattttcgtcatcttcgtcttcgtcgggggtgtcttggcgtctgatgatatcctgctcggcggcgtcgggtccttcgtaggagacctggtggcccctgttctgagctccggcggcccgcttggcatcatcctcatcatcttcattgtcgtcgtcggctggttgggcttcggtgtcggcgcctctgggtgcctccgcgattttaccgactgaaacaccgatttcaggctgagaagttgtgcccttgacgcccttcttctcttcgttgcgcttcttgagctcggccttggtgagtctcaccaaccgagggatgagcttagattgcagagcaatcaagacatccttggtctcaatggcgtattccttggtgtattcttcagacgggaagaagtcgatctcgatgtcgtagattttagccttagcgtagccaatgcccgagccaatgcgttccttgacttgcaccttgtcaacaagttcagcaatgctcagtttgctgatagccttggcgaatttctccgagtcctctttggaaatctcctcgttcaaaagaagagtcatcgtaggcgtcataatcttggcacttgctgtcataacaatttcacgaagacggggaatacccagtgtgacgttctttgccgagtgaccagccaaatggaaggtgttgagagtcatctgtgtggacggttctccgacggattgaccggccataattccgaccgcctcaccggggtcaatgatagacttcatgtacttcatgttcattaaggcctcgaaggtcctcttgctgaccttgccctcgatgttcttcttcttgtctttaatgagcttactctggttgacatccgaatactaatttgaaaagcttgttagaattgcaaagaatcgcagcgaagagatagcgagtccataccttctttagctcctgtgcgaacgcttcagatgtacttccgaggtttcctccaggggggaagtgggataacacagggtccacagcatcaatctttccagttttgcggaccgccttcatggcatccttgtgccagttcgtgacattatccttcgccagcatgtgataatcatctgcctggacttgcttggaaatggagatgtggttctgagcaaggaaatcaaagtcgttcaggtgtacctgtttggtgatgtcgagaccgtcctctccgtacaagaactggacaatggagccatctgacgcttcgcggacagaggagtcgtattcagccttgagaccttccatacccttgattaaacaacgttgcaggtaaccagatctagatgtcttgacagcagtatcaatcagaccctcacgaccagccatggcgtggaagtagtattcttggggcttgattccggtcaagaaacgaccagagacgtaaccaccggccatcgggtgagtttcgaaagccttgaatgacggaagagtctttccactgatcatgagtggtacacggcgaccctcaagaacctgttgaccaagattacaagaaatcagattggcgttaacactagatcccttggctccagatatcgtcatagactgcatttggttccaggggaaaggcttagcaaggccgtatgggagacaggcgctggtgatttcagaggagagcttggcagaccgggcgttagaaacactatccaggccactttgcttgtcgtcatcgcgaagaacctcctccaatcgtcggttcaactcggcagtctggtcaccaggagcctggtccaaggtgacatacttcaaagcaacttcgcgacccatctgaggagcagtggccagcttctccttacggatacggtcaccctccttggtcaatcgaagatcgtcgataccacaactgaagccacgcatgttcaggacgcgagtgagaagtcttccgagaataccgataagcttgccagcaatgctgtatccataaacttcatggatggcatcgatgagaccaccggccgtgggaccgagctgtttcttatcaaggataccacaaaggtactctccatcctggaagataacttctccttcttcgttgccctcgccccatcgatcgccaggggttgaagacttgctcagcaaggtcaaacctcctcgctctggaggctggatattcttgagaattgtcgtgatgagctgctttccggtccacaggcacttgggcttgcgcatggcaggctcgaccagttggatccggtcagtgacaatatgcgaatgttctggtctcaagcaactgtacaacagctggtggtaatcctcctcgtcatagaagctgtcacggcacgtaacccacgttcccatagaaatatgatcttgaatcagacctctgagcggttttccggatgtggcaacgagatactggtggtcggcatctgccaacattctggcttccgcttgggcaagctcattctgagggaaatgcatgttcatctcgtcaccatcgaaatcggcgttgtaggtgttacaattggcgtagtgcatgcgaataacccgctcattgggaaggacacgagccttgtgacccatgatggagggtttgtggagagttggctgacggttcatcaagacgtaatcaccagtggtgagatgacggtagaccttcttgttacgcgaacctttctggcgccaatttgacggtgcgagtagtgagttggcaagtgctgttcgctcttccaggttcttgaacttgaggttgatgacttgtccgttttcgttctcgatggaagaagcgccggggtatttgtcgggaccgttgataacagcctccttcaactcccagaagttgtggtttgtaacaggctcagggaaagtcaacttcttagcgaagacaaggggtacaccaatctcattgggttcgatgttaggatcgggcgagataacactacgagcagcaaagttgacacgcttgcccatcatgttctttcggaacagaccttccttcttctcgagaatctgcttgataccgttaggctgtgctaaggcagctgagccggtgacagaggtacgctcgcggtccaccaacccgttgaccacatcttggagttgaacaatggcttgaaggaggtcactgtagtttcgtgcccgagacatggtcttctcttcctcgttttgaatctccttgctgatttggttgatagtgtcacaaccctttaaaatcgcattgaacgaagtgttctgctgtgcttccatgactgttccggcaccctgctggactgcggggcggtacttgtttggtggcaccaaaagactcttgaagaagaacatgtccgccgacacaactttcattcccttgggcacaggtcgagagttgtagacaagctgcaggatctcgctttccttttggaaaagaagatgaagagctccatagacttcggaagaagacatgaattcctggccggtcgatccctgtacttcctgcacgacagccacaccacggcgaatttcttcctcagctccgtggatctcagaaacgccgttcttggacttagagttcctttcttgctcgagaaggaccatggtattcggtgcttggaatcctccttgcaacattgcaagcttttgcttctcgggtaattgctttcggaagattttgttgtagcgatcctttttataggcgggggacactctgccataatgttagctggaaagccaaagtcagggtcgaggaatattgcataacgtacccgctgcagctgacacatttcttgaacgaattgatatccttgaagaaggccttaatcaactctcgcctggcctccgcggcaatagggttttgtccgccaggcatcaaaccgtccaatttgccctccttcttggcttcgcgaatgcgccgagtgacataatcagtcctcttttgcatatagtcatcctcatcgggatcgtctgagtcgtcggaatcgccttccttgctggtcgcctttgatttgctacctttgacggatcccatcgcatcgacaacagcgacttcgtcaaccaagccatattgcagaaggcgcaatttgcagatgtacatgttaacctggttgcgacccatctgcaggcgaaggcagtatacacattgtgctcggagaaggcggaagatgtgatcgaagaaggtgacattatagaatggtactggcagctcaatgtgtccaggatgtccggtacaagtgaatgagttctggcgacaggttgtgcatctgtagaataagaaaaactcaaacattaaagattgaacagtatactactcaagtcaagacttacacatgatctccccaagcgcccatagcagggtcttgaagaccaccaggaacaggattgttaaatgaatccagagtcggagtattgtgaattcttttcaccgagagagctttaatctcttcctcggagtacacattgaagtcgaccccattaatcgtcgaggcgacggggcgcgcgaaagttgccattgtagcctgcagctccttgagcaacagaaaacgctgtcgcgcgaaatcaaagtgcttggatacaagatctccaagtgcttttagttctggagcgaacttttttttttccggaccaacttcttttctgccatcgcgccaccgccttacccttttcgggttccgtgtggattgatgcacaactgctgttacttgtctatcctttacgcattcaacctttttgtttttcctttcgtcggaagaccgagtgagaggccgtctatattatggctgatgcatcgggcaatgcgctcaagcgtcctcaccctgagggtcaacacgacaactcccagaaaaggacccgctccaaccatgggtcgccagcaccaggtcaaggaggtgctgccccgggcaagccagatgttgcgaaaataatggcagaagcaagggcaaaggcagaagctgtacgcgcacgtctacaagcacacggtagcttaccagcgaccccaacaccaccgcctgcaccttctgcaaatcctcctccaccaccaccacccgctcctgcgatgtcgaaactagaacaaatgaaagctcgagttgctgctgctactcaacgagcaagtgtaccctctcagccgcgacccagtgcacccgcattatcctaccaaccaccggcgcatgacgatgagggcatgtcgaaggctcgcggtggtctggatgttggccttcatcccgcgcttctgtctgatgctccaccggaatatcgtggtgcaaatggacggcagtctaagccaaaacgtgctggtgggcctcagcttgatctgtctggtccgtccgccgaggaaatcaggaataatccttacttcgacccctctctcaaccccaaagcgactattgcaaagccccgacaaacccgagagctcctttttaatcaaaagggcaaatacatccaacaggcagcggctctacgcagacaagcacagctagaagctatgaagaaaagaattgcagagaaatcgcgacaggccggacttgacgaggatatggatgtggaaaaggcattccttgttcctgctccacccgatgtagagtggtgggatgcaagattggttaatggcagcgactatgacgcaattgataacccggaaaacatcaaacttgataccctcaacagctatgtccagcatcctatcgagctcgaacctcctcaagacaagcacatgcctgcacagaagcctatgttccttaccccgaaagaacaagccaagattcgacgacagcgacgcatggcagatctgaaggaacagcaagccaagatcaggttgggactcgtggaagcaccggctccaaaggtcaagaaatccaatctgatgcgggttttgggcgagcaagctgtgaaggaccccacggccgtggaagctcgtgtgaccaaggagatcgcagatcggaaagcagcgcacgagcaggcaaatgaagaccgcaaactgaccaaggagcaacggcgcgagaagttggaagctcagaaagagaaggatgcctctttgggcatattccaatctgtgtatcgaattgacagtctggcgagcggccggaaccgcttcaagatcggcaaaaacgcagaacaaaataatctgacgggcatgtgtgtcatgcatccccggtttaacctggtgatcgttgagggcggccaacactctatcaacaattatcgaaagctgatgctgaaccgcattgattggaccgaaaaccctggatccgatcgagtgcctgcagacagccctgaagctcaggtttcctggttgtccactgaagatgataagggagagccccgggattttagcgcgaacacatgtaatctcctctgggaaggaccgaccaaaggtcgggccttcaggaaatggttcggtgctcgtatctgtgagaccgactctgctgccaaagcagccctgtcccgagccaagatggagaacttctggacactcgcgaagagtgccaagccagctgaatattaacatttcctacgacagataatcaacgtctaggtttattgtacgtctacagatagcgaacttgcttcatagcctttgtcattgtcatacatgatccataatacttcaggtatttactgtttgacactgtaaatcattcaaaacaagcactcaattagagctatggaaaactttttaaccacccacataaaccacgctccgtatgcaaagccgatgctaggatatctatcatagaagaacatgtatgaaaaacaaagtatcaggaaggaggaggaccctgatttccgccgctcaggttgcgtagcagatccagctgagctttaacttggtcaaagttcatagctggattttgggcctggggaggctgatgctgctggggctgttgttgaggctgttggtaatgctgctgagactgttggtaatgctgctggtgttgcagaagctgcaggaattgttgctgctgttgttgttgcaagagagccagggattgaggattgaattgagcagcaccctgctgcatgttctggaaattattgggctgcggttgttggaaggctggatatggggagaactggaaaggcatctgtggctgcgctccaccttggccgaattgcggctgttgcgggttctgggcttgctgtgtgtattgcgcatacgcggcgaagggctggggcatcccgtatggctgctggggttgctggtacattggctggccgtaggtagcagtgggttgcgcttgaggctggggctggggctcgtggattgagccgctggcctgctggggccggcgatcctggtcccactccctccctccgcgtccacctctgcctcgtcctccacgtgcacggtcaccccgaccacggtcacctcggccacgacctcttccgcggaacccaccacgctcgttgccttcaactggtggctcacgagttctcatcatctcgtggaagttggtagggcgtgcaagaggggtgtatccctcctcaccgccagcatcgtcgtagttgagctcggtctggttcaatttggaaggtcctggggctggcttcttgcctttggggccttctctggcttcctttcgatcaagtcgtctctgcttcagtttccgcttgtactcggcttctgcttcatcatcggagaattccatctcttcggcggcaacttcctcgtcgtggaagttagaagcgtcacttcccttcatgcccttgagcggctgggtgaagacaaaggtggagtgtccctcaacatagaagatatccttgcccttgactaagcccttttcttgaacttcggaggctgtggcgtatgtgacagtatacagaggattctccactctgcccagggtttctgctactacaccaatgatctggcgatcagcagagcagagcaaggagcccgactcaagcacctgatattctccagaggtattagcctcgataagaacattgttatcgatagcggcatgaactttgccgaggaacacaatcttcatctcgggggtgatcttgacgtcagggacaggcaggacctcatgttcgatctcgttcgtggtccgcagttgtccgcctggtttccccttgccatctccctcgtcatcagagccaccttccgcccgcatgaggatctgcgcttgctcctcggcactgaggattgggtagtcttcatcgtcgctatcgtcggagtccgaggaatcggagctgtctgaagatgactcgtacggggaagagtcgacctcccactcaggatgttcctcttcttcgacatcgcccgcctggccagtggcttcgatcatattgtcttggtggttatcttgcgcgacatccatagcttcgctgaggggagcagtgggctcatttgtgaaatggttcgcctctgtctccttcttgatcattacttcggtgggctcgtgctgggatataagatggatttccgcttgctggttttccgtctcgccttcttggtggtctagttgatcttgctcttgctcttgcttgattgtgtattcggtcaaagccgagccggtttgttcgtcggaggagtgttgaataaggttcaatccggggatatggcttggcttctcagttgtgctatctccagcattcaggctggttgcgccgatgtcttgggaccctgcgataggtgtctcgataagacagggttttttcgaggcagggccttcaccggcacctgtgctgtcagttgcagggttttgatgtccatccatactaaatctccaactcaaaaacttattgcataaaaaccagttcaattcgaaagatcaaaagccggacgggaaacttttttttattttgccatactctgaagggcggtcaacaatgtcttatcggttatcggttatcgtagctctgtccatggatgattgccttgcgacttaacttcaacgtacaagatggcaggaaacgacaatgccctaggggatgcccataaacctcggacaaagaagcagtatgttcatgaacctgtgtgaaatcaaacatggtgctaacctatgtatagaccgccaccagctcccttctacattcccctcaacatcactctgtacatattcctagttgccaacactctcgccgcactgtactctccaattcaggattgtgatgaggtgttcaatttctgggaacctacacattatctgcagcatggatacggtcttcaaacctgggaatattctccggtgtattctatccggagctggctctacgtgtcgctccatgctgctgtaggcaagatcgcatctttggtggtccatagcaagacagctgaattctacacaattcgcctatctcttgcatttctgtgtactgcctgccagactcgactatactctgcgatatgtcgtacactcagtccccgcatcggtctgttttttgttatgatcatcacactcagccctggcatgtttcatgcttcgacagcctttttgccctctacctttaccatgtatatgtctatgcttggtctggcatcgttcctggattggaaaaactgccgaaaaacagcgaagggcatcatgtggtttggcctggggacaattgttgggtggccgtttgccggtgctctcattgtccctcttttagctgaggaggctattgttagtttcatttctggatctgtcggctcactgctgtacaatgtctttgacggtatcactcgttgtttgtcgatcctggtaggtgacttcctacttggtttcaatttctttactaagctgtatcacaggctctagaagttgcggttgactatgctttcttccaaaagctcgttctcgtgccttggaacattgttgcatacaacgtcctgggtggagaaggtaagggaccagatatctttggaactgagccatggactttctatattcgaaacctcttgctcaacttcaatgtctggtttgttctcgccatgctatccgcgcccctcctacttttccagatcgtcttccgatcgcacaccgcctccttgcaaacctcattgcggtccatggccctggtcgctccattttatatgtggttcgggattttctcggtccagccacacaaggaagagcggtttatgtacccagcatacccgttcctggcacttagcggggctttgagcttccatatcatcctaacctaccttggctccactaacaaaaaggagctgatcggccgcgtaccaactaaattaaagattgctgcagctatgtcagttgttcttgttggtctgaacgctggcatgctccgcactctaggtatggttacggcttataacgctccattgaaggtgttcgagccactacaacgtgtggatatcgcacaggcaggagactcggtgtgtttcggcaaggagtggtatcgcttcccgtcatcgtatttccttcccaacgacatgcgcgccaagtttatccgaagtgaattccgaggactacttcctggcgaattcccagatgcgccaagttatattgggcgtctggatggtgcctcacagattccatctggcatgaatgatctcaacatcgaggaccctactaaatacgtaagtgtctcaacgtagccttagaattattataccctattaccctatgctgactttacaacaggtggatatctctcaatgttctttcctggttgactcttacttccctggtcacgacgcaactgagctagagccccattacctcctggacaaggcgcagtgggagacgctttcctgcgcaagcttcctcgatgcgtctcaaacaggtcttttaggtcgattgatctggattcctgatttcccgatcatcccagctcgctttcgacgcaaatggggcgaatactgtcttctccaacgaacagtcgcaggccatgtataggtcttgaatccttctagataaaacctctagaagaattatgtaaaaacatcaacagtgaaacattcactcgcatcgagtgcaaacaaataagtaaacaagaggttatcaagtacatgcgtagcttcacctttcccaattagggcaaaatatccctcaacttttagcttttctccgcagataaaccctgactccgcttcactggaggccaacaacagacaaaccaaggacaaaattatgcagtcccggatttgacagctcgaaaaggacggtctctattcccagccacattggcatgttgaccaaagatggactatctcgtatcggattaacacggcatctcgcatgagaggaccatctgggcggttaatatccttctccgcactccagacttgataaggctttgcatttactatatactactaaagttcctcgacttctatcctcaatgtatcctcgaactggctactgcctaaaactactctgccatgaccatgtcggtacttgagtccctatggggaactatattatccatcccaacgaaacaggccgtggatatctttatcattttcgctgtctgtatatggtttattatcgtcgtctcacggaaatgggtttctagtacgaccaaagcctcgaaaggtgatctagagaaacccgtgcgaggaaaggtcactaggccacctggtggtaagtaaattcaggatggtagttcatgcaagagaaagtctcactaactttctgtagaatggactccatcggacttcaaacggccaacagcagccccatacgcaggatgggatgtccactcgacgaagccaattccctaccggccgtttagatatggcccgtaagttgaataaatcaatagagatactgctagccgtcttttaacctctcctcgcagaaaatactacgtcacactaggtttaagaagcatgaaatgggacgaatggatcggtgagtcgttcttcgatagccagatctcagcagcccattgacctcatatacccggaacacagagctcgacaaccactatctcaagtaccacgccgacaaatcacgccgcattgaagagcgcggcagcaaatgctgccacaccgcaccagaggcaatggatgctgcaattgaactactggaagaactgtaagagcaatcaaaacatacacatccctatccaagacctcccctaactcctctcaccagatgcgcctacctccccgaaagatacccaagcatgttcaccaagaccgcaacaggaataaccaacaaagtaacctacgaaaccttcaacataacccaacgcccactgccagaagacccaatggcaacagccgcccgactcgtccaagacgacctagcactaatgatcgagcgcccagacggcgaatactacctcctcgccggcgcagtcctattagcgggattctggcgactgagcgacaagttcgggatgcggctctcagaaatccacacatcaggcgacgtaccgcagtacaagagcaagctggaaaaggggatgctgaatttcttccgccgactgcggcccgaagagccggttcttcggaacaattatttcatccaggtcgacgataacctggcgtggtcgcatagtattgggcctgaggatgccgagacggtgtcgtggaatacggcggagaagaaccgggcaattgagaatcatttcttccgctccgagaggcagtcgctgagaagattgcccagatctggggcggtggtttttaccattcggacttattttgagcctgttattggtattgctgaggagccttatgtccctggccgtttggcggatgcggttaggagctggggggatgatgttgggaggtataaggggaaggagaagtatcaggatgttctgttggagtatctggatgagaagcatagactgcaggttgagggggggttagatgttgagaaggaggatgaggttaggaggtatcctctttgaatgcaatgtgaatgtggctttttatggatgatgtctttccttattcgagtattggcgatattcctttccaagatcaggactattagatgcaaatattgcaatgcctgatcctgcgcataatcaaaatcaagaatatgacctccggaaagatgacctcaacaggcgcaatatgatgtacatagtaaaagagcatgctcagtgctaaccaactgcatattcctgcacttgctgaatgcaacaaaaaagcaagtctcaactcaggctcaaacaagacagatcatatatccgcaatgggcccagctctccgacctccaccccgtctcgcataagccatctcacgctcctcgcgccaagagcactcatcgcggaactcgcagacccgacatttccacgcatccatgatatccacgccaacgggatctcgtttgccgcgccaccaggtcatctggtcagctaggtaggaggtgagggttgtcggatcgaagaggaaagatcggcttccgatgagctgtctgtttaggtcttcatcggggacagatgagagatatctagccgtaagcactggcgagaggagggttgagtatggttccaaaagctctggctgggaaagtgatggaattgatggtgcgacggattgtgtgtcggggacatcttcggggaggaatgtgaggcggagttgctgtatcatgagactccaaagacgggagaggttgttatgtgttagaagggtatcgattgagtcctggctagcagtggaaggatcccggcactgttcggattcttgggaggaaagagcgtcgaagaattggtcgttcaggccgccgacctccgaaacgaaggcgttcgtgaagggtttctcagcatcgaagtcgtaacgagcggcaaggcgatcgatagttacatcgtcgctcgtgatcagccggttgagcatatggtagtagagttgcagctggagaagagttggccggaaccccgtgcttttgacattcggtagtgatcggttacccttcgtcttcacgtctgtcaaataaatccggcgcaggttatagaccgccgcaggcaattctggctcagtgtgccccgtttccgcggcttcactttgccccagatccgaaagcttcatcccgccttgcgaagaagaaagcaaaaagtccgacaaggacatctgatactccggcagcgcagcgcgcgatgctacagcgtcggcatagaacccagcagcagtagcctcaagctccgggttgggacattcataggacaactgatcaatgatgccattaacaaactccccatcgacaacgccccaaacctccagctcacgcgtaacaccatactcgcgcagcatgcgcagtccctgtataacattccatatcctgagaccccacgcgtcctctttcgtcgtgatttccacagggacggtagtgtagatctcatcctcgagcgtcttgtgcatggtactccccctcttcatcgcagcggtcctcttcttccgcccatgtttagtcaacgagaaccagtactgcagctcgcaccaagccggcgagaccagatccgtcaccgaaaacgccttgttaggtgcttgccggaaccgttcgacgggggatcgagtatcgagcgctgcggtgacaggatcttgctgtgtcaattcgagcgcgcgcgctgcgttgcgctcgcgttctctttctcggccctcagttgaatcagcggtctcgactaaacgcttcggagaagatgtcgtcagctcaattcgggttggatgtaacgggaccaatataatgggaatgggaaagtgtggatgatcaacggcgaagaggaagaggaaaagtagagacgatatagcataccaaacgggctactcctgttgctgttgccagcgcgcggatctgacctccccattgcactcgtcctcgcaccccatctagccgtctgacccggtcgaggctgcgactgccgccatgacgagtaaggctgttcccggcccagcaccttaggcagccgagcgctagctggctcaatgccatcctcgacatctgcaaggagtgcttctagagcttccggttgcaatgactcgagctcggcgagtcctggggattttggtgcggtgatgtgttcgatcggcgttggggttgagggccaggttgatgtcgagatgaaagtggcgtcggcggtcgcgtgttccgcgacggctttgtttaacagattgttcaacagatcctcttcatctagagtgaagtcggatccgtagtcagtgtcattatcatctctctctaggcaggacatgcctgcgacgggagggaatcataacctgttagatagagttgatgttcgggtgcgtcattgcgatgttgagggagctgccttaagaatcccgttgttcttactggctggccatcacgtacttgataatagagatattggataactgtgacataaaatttaaatagcaaaagagactgaagtctattgatctaagtaattgctcttggtatcccatgcatcgctctaaaacagaagaatcccaacgccaatactccgcggggatctatctataaatgtatacctccactcagcctcaactatacttccaggtctactgtccacgcattcatatagtcccagcagagatcatattccccccagaaacaggatgcaaagaaccagcacccatgccctgcgcctcagcaagcgcctcagcagccgcaacctccctagcagccttcagattcaaccagttcagataggtctgccagccaaccgcaatgcacccagaaaagacgttccggaattgcgccggcacgtacatgaagctgaacgcagtaacaatcggccagagcttaacgctgtttttgatactaacagggagagccttcttcacccgctcccacgtctcctcgaacgtcgaaccagcaagaagagagtgcatgctaaagaagtacgtgttgaagacaggagtgaaacacgtctgctgcacgacgactttcgtcaggatcgagaggaatttgctcgggtagttgaaatggttgccgaggaacatgaacctgagagggaagttatatcagttaacagtgtacaatacgaatacagacctctccactaatatgtaacaatctaatatccctggtcgcatgtcgcacgtcgccataatcaaatccgcatcacaaaaacataccagtgataagttggaatactcgacgcagcgccaacacacaaactccgcagagtcctaagcggatcataaccagcgctcacagtctccccttccccaaccccagccgtatccccatcttctgcgtccgatttcgcaggcgcaggaacctcagaaggaaacagcatctgcgcgctcagatcaccacacaggtatataacaatcgagctccagaactgcgttgtatacggcttgcgatcttgcgcgcgcgcgtaccatctcccaaacttccccagcggaccggccattaccaccgcgcggaagccgcgacttcgcgttggtgtggtcggtgctccggctgcggtagcggcaggggctgtgtctgggcgcgggcgcaggggtggagttgggtggcttgaatggtgcgagtgcgagtgcgagtgtggtgggtgtgcaggtgtagcatttctctctgctggtgtctttcccgtagaggagtccgagttgtatcggtgttgtgggcgtccgcggcgcaatacttgcggcttggatatgggggttatcggtcggaagggggttgagggtgaggttgaggcccttggtaagagggcatttcggagagggttcatgaccaagacctcatatggttatttgagtgaggatagttgaaggtggaagtaaagaaaattgtgagtcaagaaacaatggctttgaaatccgacctcggggattgtggcgataagagccgaaaagcgggggaaatgccgagatcagtcccggatgcggttctaattagggttgggttaatttgtttacatttaactctattcgtagaagatatatatagacttgtagaaaaggcgtccgaaagtagcctggtatgtatatgtatgtatgtgtttcttaaatcaatcccaaactccagctatacaaatgcagcccataaaaacattagtcggatgaggttaccctcggtgatatgaacgggtatcaaaatagaaacaaaggtataacacgcaaaaagggcacttttagtgatcccaaagcaaaggggtcaatagaaactatgattagtgacacagacatgtataggtatgacaagcccggacagagatggtaaggtgagagggaataaacagctgatcatcagccgcctattgcttgaaggattcacgggtgttgacacggtcgatatcgtaaggatttccctcatacgtaaccgagcgagccaacgaggcaccagtgcgaatagaagcaagggagtgcgcacggctgcgaatgcgctccgtattagcaagttcttcaacgccgtcctgggattcgctggagagtgaaccgtcgggcagagcttctgtgcggtcgtattcctccttctcatcttccatcggttctggaatggcctgttcctggatcttgcgcatgaatgcctcggactgggcggcgaacttgcaacgggtgcggatcgcgggtccgtatttgtagaacaggaatgggaagggcacacaggcgagcgccaggaaggccgggatcgatgaggcccagtgaatacccaggttgttgtacatgtaggtggtgaagagagggaaagcggcaccgaatagggaacggataacggagttggcggctagcacggaggcggcgaagatggtgtatgagtcaatgaggtagttcatgatgctgaggaagactaggaccattccgaagccaaagggaacgccggctgcgatgctgaccatgaagtggattgaggggtagttagtccatgcgaaccagaatagaccgactgggattgcgacggatgcgacgaggcaaggcggaagacgtgcctccgggggtgcgaagccattatatctgtcggatacctcaacatagcgcttgttgtcaaagagggagtagatgacggcagacaacattccgatcatgatcccgaggaaggcgaggccactaacaccctggttccagccacgggactgctcgtagacaatggggaaagcggcgaacatcatatacaaggtaccgtaaacgatagccatgtagagagacagcaggaacacaataggctcctggaacaacagaatccaagggcgggagagcgacaccttgaaagagtccttcagagagaccttgccttggtcgatttcaatcttactccggtacacctggcctgacagctttgacagtctctccgcacggcgacggagtagcacgggcgcataggtctcggggatggtcagagagccaataatccaaaccgtaccagcaaagacggcaaggaaacccatgacccattgccagccaccgtcactcataccaatgaatccaccagcgatggggccgatgatagggccgaggaaaggtgcagcggcgaacaagctcatagcgatacctcgctgtctagcggggaacatgtccgcaatgacaccaccggcgttggtcaaaggcgaagatccaaatgaaccggcgaagaagcgaaggatgatgatagaccaggcatttctagaacctgcgacaccagcattgaatgccgtgagggcagcgtaggtaccaatgaacagtacttgacgaccaaacagctcactcagtggagcccagagcaaaggtccgatctataccaagcaaataacgttagtatgcatgcgaggcagattgcgcaagagtaaatatctaaaagatgagatcttaccgcgaaaccgagaacgaaaagcgaaacaccgagagtggcaacttcttgtccaatgtcaaaatccaccataatctctcgaataccgccggtataggcagacgacaccagtgaaacagccaaggttgcgacggcgaccagcatggtaaaagtccatttcttcacctcgctaaagttcatgggattgcgagggtcgttgggaagccatgttactgcaaaagggtcctcatctgttcctgaaccggggtatgggtggtcgatgatctcttgtgtgacgacaccttggtcaaagaccaatcgccagtatggaattttcgttggggcggaggactcgatcttgtccgagacctgagggtctgagtcagctgccatggtgggcaggtagtgaattaaggtttcgatatatagtcgacagtagttgagtatgtatttgctaattagaatgaaaattgcgtgggttcctgaagctatgcgggggatagaaaggttaaggaatgtcgaaaaattagtggaatgagaattagatatggacgtcaactgccagctatatataaagggggggttgtcaaatttatgaacgcgatatatgcaaataaagtacggataagtggaataagtgggataggtgggcctcggacccgggcaagatatgatccgagaaaatttgcgatctggaccccaggggctttatttgatattgatttcatcctgatttcatgcctaatccgtacatacctctcagactgaattgaagggctatgtgtcgtacaaatatgagtgttcagatgcagccctggaggcaaggcgtacagtgctctcgttctgtttgcagccacgtttttgcgccacgtgatttatgcaggttttatgtcgagccactcgggtatgcggcatctatctgattgggtcacttgaccgcaagtttcagagcagatcaataagccaacgaaaggttaactacgggtttatgatcctagctcttctattctagtctagtctattctgaaggttcgatcttgttttcgatctcgtatctctttacatcacggagtactccgtgacttttctaataatgtacagtagtattgtataccaataaatatgacaaatacacatggtcatgcataaccctcggaccccgcccacattcggacgttccgcatgggactcggtacctaaccgaagtttcatccacccgtagacgttccaaagaacagatcgagaaccgatctaaagatcggatattcatggcaatctccgatgcacgtacataactatttttttatgatctttatcaccactatgaccgattaactccgtgtacatacatacttcataaacacgaacagattctgattattcatcaaggtcaggggtctgcataccagattttaggaccccggatgcaagtttcccgatcggggtggcgccgctttctggcgcttagggtcctgttcactgaatatctgacgacatgattacaacatagggtctttgttcagtgacacttgattctggacttcaggtttatttattgaggggatcactggtttcgaattaattgagtagttaccccggggcctcagccttaataactactggtcagttacctgattaggttagaggaggcttaacattacgtaaggcgcccctctgttgggtgccgaaccttggccgaactctagagatatagcctttttagcctcaccttgtccttcttttccttttttttttctttttttaaacagaggtacgtacctggatgtttatatggttcctagccagaggtagaaccttggaaccagacctggaatgccttaaaatatgtgtcatgtcagtcggtactgcagatcacttacttggacgaacttagatatatatacatattgaagaggggaccctgccacgaaggacaggggcaccgacagacctgcctgcgaacaggtgtgagagcagagttgtcactggtagtagggtgctagagaggagaacaccatggggtgactactgagaagtgaaggtggaaaggtgtctgcgttgctcacatggccacttagtcatcctgctctggaaacccccactgcaatatatgatagagggtttcagttcaaagggccttggaaagatcaatctatggagaacaacgtctaaaaatacggaatctttcctgactctgctgtaaatctacgaatcttcggggttttttcacacctgtgcgaatcctttctgttccagcggacaacatggctgatattgagcctcttcgtacatgttcttgcgacagaaacgaggatggtcatcaagcgcccgagagtcaagttacatctgtgcatcaagctgtcgtcgaagggaatatcgagctcctcgaagtgctgattcgggatggagccgacatttctactacaatttcctcccgtgatttcacggcgcttcacctcgctgttcaggggggtaatgaggcggccacacgacttctgattcacgccggagcgaatgtttctgcgcccagttatgacggcgtgacaccattgcacaatgcagctgctggagattcggtcgcggtagctgaattactcgtcaagtctggggctgaaatcaacgcacggaatatcgatcacgaaacaccattgcatgtagtggccttgtttgggaacgaccaaattgcaaagctcctgattgatgttggatccgatatctcagcaacagagtgctacgggaacacagcgctgcacattgctgccggccgtgagcatctcgagatagttcattctcttcttgaggctggagcggacgtgaatgctattaacaacaatggagatcccgtgctacatcatgcaggcagagatgatccaacatgcgttgatctgcttctcagccatggcgcagatgtgtatatgaaaggtgagggaggggacactttcttgcatcgggcagctgaaagctccgcggaactagtgcgtgtcgctcttggagccgatgccaacgtcgaggcaaccaacgatgaaggaaaaaccccattgcattctgcagctgcgtatggcgaaaagcaatcaatccgacttctactcgatgcgggtgcgaatgtgaatgcaaccaccaaaattggcgagaccgcattgcacctaattgctggcgattcttcaatagatgaatctgatgagaaagcaaggctactcattgatgctggtgccgacatcaacgcgaggactgtatcgggacaaagcgcccttgatcttgcaaaagacagcaatgctacagttatacaagtactatgcgaaagatagaaatcaaattggtagaatcatagtctcagtgtcgcaaatgaagtttacactagacaaaaaacatcaagtcacctacggagacgaccacaacgaagcaggattagaatcatgaaatgaaggtagtgcggtgtcgcatgacgtggaagactgtctttgacatgggtggcctgacctatgtctacatctattttcaagcagctagtgctgcttcgggtgtctattcgcttatagtctgactcggcacttgacattcggatataccctcgggtccatgggtatctagagcgctggtgccttggcgttgacaagttccaaggttggcagagttggcaacggggcctgaaagtttaacgatatataactaatcttcgtagctccactagttatgccctgatttatttatttgtaaatttttaaaggtgacatgagcagtcaaaaaataatagattctctctcgaggtcctctccaatcagaacatctttaccaatctttgacaggactagctcgcatgttgtaggcggagctcctcccaggaagagtcatccgctggatcaaccctggaagagccccttgtcctctggcactaccgagatccactctttcatctggcgaatatccgtaatctcggattgcagacgacctgattttgttcttcattttcgcatgcttagagcaaatatctatatgggagattctatcggttttgacttctcataaactacaggttacttctctccaatctcacattgcaagacatgggatatcacaccaggtctacgactacaaaagatacaaaagggtcgatatcacaaaccggatcaacctattcaactaattctgtcgacggaatgggggacaaaaacgaacgaccccatttgctgcaacagtgaaaaatattctccatgggcaaatctccctttcagaacagtccttctcttcaatactgcggaagatccagatttgcaaagaagagacattgaataatgcttggctgcaatttcacacggacgctcggtgtcataaggaagagggaggctcaccaggaagaaggcaagtgaccgcagacaggtcttgctatcccacctgctatgataaacgtatgatccatatgaaaaggcttttcaaagcgacccgaagttgctcgtctcatgtctggcatgctatcaagaacaaagtgctgaatgcggcagatctttgcgacagagatgatgttcttccactttccagctcctgcttcgggtcatcctcgttctcaatcgatctttaattggtctcgctcgtcacggtaaacacaccatgagccataagccccaaggaaagcgatctcaagactttctacatcaaaggtgtctcccgtattgaggctcaggtggtcggggggttgaaattattcaaaagccgtcgagctgaaacggagttgacattcctggtgacagttcccgcgcactatcccttaaaaggcgaactcactacacatctgccttggtgttctatatacccagcaccgtgataatcctgctctgcgcgttgggtgtcatttcaattcgatataaaaatagattgtagttcttgaataggaaccaaattaacgaggaaaggctgttccagggaaacctatataatctcttctttggccatttactacctcttggccagtccaatcactaggaatgaaattcaaggctggtaaaagtggtcgatttcttgagcagatgaaccatcaaaaatgccagtggacctcgggagcttccatctcccgattgacatcactcatgcgaccaatcagcggtgaaaatacctctgtattgtatgtaacagttactatacatatcgaggggaatcgaggctagaattttccacgtgtcttagcgccttctttcttgcctcaggccaaatagatccatacctgtaacgaactaactgactatgtatggatccaccgaggatggatacatctaccacgagactatatagccttgatcttagtacccaatatgtctatacgtgtcaggctctagcaatacatgcttctcatcttcagctacctccttctctcatatcgaggcctttccggctatgtgggaagtaagatcaaagaaacaaaacacgcgttcaagtcactctgtctccacttaaacttggcatgacagctgggatccataactagatacggagtacggagtagcgtcttcagccttgcaaaaagaagaatctttgatttttaacatgcagaatagatcacctgttcacagtaactgttatatcggtgttttcatactaaggatgcgctccaggtgcctctcgtctgcgtatgttgtactgggcttgataccaggatcggcaaatgtattcatctgatctactcattgttctttcgagttcaggattggtcatatgatactaccctgcgcagataatcctgttttatatgaacattcctcgggatctgaagggtaatgaaccttacagtactacctactttactacctacatacagccgcctagagcctctatgacacgctgagctcattcaagtctcgcttttgattcgagtcaagtgcttacgtggcaatcaggtttgtgtctggccaggactttaatatggtatgatatgaaccagtcggaaagcggaaactcgcattcagattgcgtgctgtgtgctgtgtgctgttcaattctttgtttggttgcttgattattgtattgttgtattgcaggatttgattgcggacttccaagttccagtcacttgaaaggcaggattaggtcaagatgaagtcatagtcgagatgtacattgagtgcttcggatatgagtcaagtactaggtagtataaagagatgaccccacgttcttgaagcggggttttccaagtggccgagaatttgttcttgtctcagtcagattccattgtctgtttgtcgctgtctaattatagaatctcgtacttaggattccgttgcgcaacgagagaaaacctgccgggagattcggggtgggatcaaatcacctgtttttaggttggtttggaaggaaaggacgatgtccgagatggtatttttttttgcagtttaaccaatttccgatctcattttcgacggtgttgttgggcgttagtactaccgagtgaaaggcaaccttgcgaccgaggacggacatgagaccacaagacccaaagagaacaaagcaagaatacttcaggccacagcggactaatggctacccaaaaagacaagtcggtcgcaaatcacataaattaagatttaccatttacaatgaaagaagtattgaatcaagaagacagcattaaagcgtcttgtcatgagatgatgcgcgctaaggcatcatgttaaagggagcccccgtaatgtacatgcccatgactgatccatcaatcgatggtgagcagtagcatcgataaaaaagcaaaattgcgaagcaacccagtgccgaaacccattgatattgaaagcaaacccatcatgtatcgccagtagtcatgataaaaagataaaaacaaaccccatgatcgcctttcagaaaaccagctcgttgaaaagaaaaattacgagcgctcgccacggagacggcgggccaactggatgtccttggactggatggtgacacgcttggcgtggatggcgcacaggttggtgtcctcgaagagagagacgaggtaagcctcaacggactcctggagagcaccgatggcagaggactggaagcggagatcggacttgaaatcctgggcgatctcacggaccagacgctggaaggggagcttgcggatcaggagctcggtggacttctggtagcgacggatctcacggagagcgacggtacctggagatgaacgttagaaatgtttcaagtggattcgtcggcgacagcagatatgacttaccgggcttgtaacggtggggcttcttgacacctccggtagaaggagcggccttgcgagcggccttggaagcgagctgcttacggggagccttgccaccagtggacttacctatttgcgacagtcagtaaaatgtctcatgtccaacgcgtgaacgcgtcgcccatcctcaaggcggacacccgactaatcaggtatctgcagtgagatgaataaaatatgatagaagtaatacttacgggcagtctgcttggtacgagccatctttgatgatagacttgatgaaaatgtggttttgttgatgaaagagttggttggtggtggatggatgtaaaagggaagagagatgcgggtgggggaagagtatttgtaggagacgggaggggggggattgatctggaagggagccacgaatcagcgcacggcagccgatcaggatcagtcaggaaactcagcgcgtaggactggggactgcgcagcgtgtagcccagagaccgatttgcggtgagctctgattggccgagctggatcaaagtgctggtactgccaactaagcgagaggtgggccaatgagaacgcaggatcagggagtatagaatgctcaacccttgaattcttgatcttgcacccaacctcctttggatgggggagtcatgcatctgagcgtgctcaccatcatttggaatgtataatcctttctttttcctacaattttacattgttggtggcgggtgataccaggatcaaagaccgaccacggcaaagtcggcgagccaactctggggtctcccggcagatcaaggttggtctgtgatcctgcgctctcattggcggacgcgatccctagcgcgtgatttcccaatcctcgctcattcccgtatcatacaaatatcctctgtccacttccgtttcttttccctcttcttccatcaattccatcgacaacctctcaattaccaacttatctccatcccacttctacaaccccctttttcttctaatccatattcaatatgtctggccgtaagttcttaccccacacttccacttctccaacgcgttctaacgcgtctcatttcaggcggcaagggtggaaagggtctcggcaaaggtggtgccaagcgtcaccgcaagattttgcgtgacaacattcagggaatcaccaagcccgctatccgtcgtctcgcacgtcgtggtggtgtcaagcgtatctccgctatgatctacgaggagacccgcggtgtcctcaagaccttcctcgagggtgtcatccgtgacgctgtcacctacactgagcacgccaagcgcaagactgtcacttctcttgacgttgtctacgctctcaagcgccagggccgtaagtttccacgtatcttcccattctccaacgcgtctctaaccttcctcttcaggtaccctctacggtttcggtggctaaatcatttgttgttttcttttccgggctggttcacggtacgacgggacgttggggtgttctctgatttattttactgcaactgtcatgggtctctgggtttgcttttcatatcactcgattaccactattgcgcgtccatagtgtgcgcttctgagcttttctgtatcataacggcctctacattacggctggcaccatagacatggtgggatcaagcacataagtgcgatccgatacgaatacaatcaattaaaacttgaaataattgatgtctgttctgagtcgatctcgtggtagatgtacctgtacgttcttgtttattggcttctattttgtattttggtgcttgccactctatcgtcggtggcttgatctttcggtcttcgcgttgcttgacgcgttgttttgactgcctgaggctggcctcttttccatgcccaacatcaacccaccatggactatattcgttcgatctctgttattgacctagtgttcctagatcttcaaccttctatatgtctattctatcgtagttcattgtgttgctggttcttcagtacttccatgatgtatgcaggcgaccatatacacttccgtaacaattcatcatgcttttttgtagtttgcattcaattgcgtatgctgtgctttattttcatgttccagctatttgaatggctaactcgtatggtttgaagtatgtgtgttgttggaagagtgtgtgtagacgtagatgcatactgatttacaccgcagatatatatcaaaccaaacattaaaccatagagtctcactccgcgcacacaaaggcattgaactcgaacaaaatacacgcagataataaatacgcaagtaaaatactatataaatacttcaatagagccatatagaccccgcattgtggtgtggcgagcgaaacagatctgttacccaagtcgaagatgaaccccccaaaaaggaagttcaaccttgcttggcgctatgaagcatgacagattcggatctacccacaaccaagcggcaaatgcacatataatcgaaacatgcgacagatggatttaatattcagatttggaatagaaatatatggtgtcctttgaatgtcaggtgatggagactaatttatcatacgaagaccgagttgaaccgcctgaaacggaggtccatactttttttgccacccagctgcatactacaaggtcgagagaaataaatccaccaatacatttgaatagaccaacaggcctgcagataatacaaacatggagtacccaccaagagacgaatatacaacagagcactatatggtcaattagcaaccatccaagctagtataccctctactaataccaccacacagaccgaaggcatcgagcaatcaagaataaattaagtatgtcaataggtattttggagtgagactgggagtgcaatataggtattactccgaccacagtaggacaactatggaagacacatacccgaaccccgatagaccaaacggagtctagctgatatcaccttgctgacctccaactcgcccacccttggtgaagctgacaagacttggtcttctcattccatctattcccacccgcgagatatcgccttggattcaactgtcttaccaacaagctgctttcgcaggagtatgatataagccccaggctaggccgtggtatcaatgattttcccagttcattccatagccacggcattcccagtcggctatcttctggtccatcatcgccacagccaagtcgtaggaaaactgtggaattgttttcatcaaaccgtctgggagtttcaacggtagagacccctgttcggaccactgcctcatccttcccaacagcatcagattgtccatggtcagtttgattgccatgtcttgcaaccctctatcgttcctgggtgttgagttgtagatctcagtaatcgcatgcgtgaatgtctccaggtttatctgtcgggtcagctcttgattggccttggcctttgagagggacttcagtccttcaatgaacatccggtctgccagggagtacatcaaaatgtgaaacgatagggtgtcagatatgatcgctggcctcttggcttgttcaagaatctccatggcatccgagtccggtgttggtttgtgttgatcgatagagatgtctcgcgctgggcagtgaacttacgcccatagtccaggtggtagagatactcgatcatcccttcaaccaagagcggctcttcttgtagtacgaccctatttgtgaatgcctccttggttatattagtcgaggtgcaacactcatatgttgttctctatcttacctggaacccactgtcacaggctttggcaaagaaatccgatcgtgggcaaagtatgcacttgtgcacggcatattcatcgtctcgacacacaatgatcaggtcactgtatattggctcaacccgtatgctgtgatgacgttgattgtctttctggtctctgtggtagtatctggtacttttttaaggcgtccaaaagctccttggcagggctgaaatcttcattctctccaccttgatatgtagttcccaactgtcagattatcctggcgcaggtactctcgtccttcacatcgacgagacagtggtgagcgttaggtgtgggacgttcagattttattctctgcgttgaggttactgatgaaagtgagtgcagggtgagagatcaagagtgaaggatggtggggtcagctgatgagtaggtctgcattcttttaagagtgagagtatatgtgcaagttgatgtttggttacctggtctacctagccatcccaataaagaacaagaccaggtaagaccataacagccagacgtgctggtgaattgctaaccttttaatttgtctagagcctgcgtgagatcttgaaaaaaaaataaatttctatagttagtgagtggaatgaaaaaaaaagatagacatagcatgtcctggtttcgatccagggtcctattgtgagttagtttgatgtttgtgagtcaaattgggttcggtgaaacgtacctccgggttatgagcccggcgctcttcccctgagctaacatgctgatgacgttcgtgagtcaaattgggttcggtgaaacgtacctccgggttatgagcccggcgctcttcccctgagctaacatgctaggatgttggaaatttatttcacctttgacaacatagaccaagatatacaagagagatcttcctagaaattgttcacttagatatgatgagttctaacttctgtttaaagggctaccggtataatggaactcgtctacaggaactctggtgtctgcaactggacgtcacatgtctattgtttaccctctattccctattcatggaataaagttgccttacagcttactgcctcattgccaagatggcctcctgctcattgctggctcagataatttcagtaactacatgtccttgtgtcaccagggatacagaaaggtctctgcttccggagggtcgatgggtcatcagagacaacgctgaagtgcagtgcatacagatctcgtcgatgccgaataccgatgagcgtaagtctgcgttcaagagtgccgaggggaactggcaccgaatacattccaggagtgtcacgttgcgacccaaagttgcatactgagtgatactggtcgttgccgtgccaataaatatgttctataaatggctctgtatatacccggccacgtgctctctatagtcaacctctggccctctgggagctaatcaatagtcagatatcaacacagtagtaagtcatcccgttcggtaactaaactcacaatattgctctccacccgttgtttgtcctgcaaatatatcatctcgccacctcttcgaagcgttttgctatagccaacgagtgtttccaacttataacttggagtctggatgttttcgatctccttctccagcgatcgggtcttttcttggatgcacgagagctaggctggtcgactgtcagatgctttgccggtgtcaggcttgatgtcttccttgcaccgtaccttattgtatcttggtacaaccccgttggattgaggacatggaagcatgcgattcctaccacatttggttccgtaattcatatataaatataaatagaagtatgacgagccagatcaaggggagtgcttcaattcagcataaccaagacgagagagaaagtacagaagtgggagagggcctgctgatgaacgtatcagactacgcaaggaggaagagaaatgatcaagtcgaaagtgacaatcaagatatatagaagatgataatctagccacacttctgaagttctttaaatagcttcatgattcatcccacaaagctctaaagatctcatcctctagaatctaatagaagcatctctgcaggcgaagtaaagagaccaccgacgcagcaagctgaacgccaagctgcctgcgagaggaaaaaaagagagggaaaaggaatgccaaagagaggtctacaaactgcttggggtaacagtgaatgtgcccaaatgcatcaatagctggccacttctgcaaaatgaaagaatctcttgcttatacatcttatctacccaccaactagctgggatatttcaagggtctatcaaaagcacaatcacaagcaactaacctgtcctggagggtggctcatgggtgcttggtaatcgatggaatcctagagaatctatacggtttgagtatcagacagaaacacgacatagccactattctgtattataatcggagacatgtggcatttcggaatgcagggatagatcgtggttaggttccaaaattctagaataacacgtgtacataggcatcgaagtgaagaatgtgccattccttgctgtcatgagttgcatagccacgactcctttcccagcaaagctccttggagccttctttctaagttttcttgactcaaagtaacgaagcgcatagtataagcatacgcggccagcctcgaggatttaagacagacacgtcatgaatttttgaaggtgccaaggtgtgagtcagaataatcagtcagtgttggtaatccaaaatgccaaaaatctaaatcatcaataacaaaacgcgcaaagcaaaaaaaatcttgcatctgaaaacaggagcatggtcctccgacaatgtcggcgatgcccggaggccggcattccgggacgaaaatagaaagcttccagaagaacgaaaacaaccacgctttaccgaatgcaacactagcggcatgcaaaagccactgaaaattccttctggaacataccagaaataccgaatacgattacctgcagattgtggctgctccaagtgccgtacggtaacagataaccggaaaacttgaacggcgtaacggcagtaccgagaagtggctgtgcagccctagcccagcatccaatcatttacattgaaaaacttttcgctgctgcattagctcgttactaaatatgatcctgcatgacaatctcgcagacccatcgccgagaaacccggattaaggtgctgacataggttttatggtcgggattgcatgccggtgaaaaatttttctccgtggtcgtttgagtcttatgcaggggccctctattggtaatgaacaggatcgatgcctaattgagaaggaggttaatgtacatcgtaaatcatggtgccttcggaaggataatatatccccagatcttatacattccactataatctgagtgggccattggatctggatatttggatcagctgaggttggtttgccacttccccagactcggtaggggccacgtttcggtgcaccctcgaggaatccgccaagaccttccgggttttgtccacatgggaaagggagatcagtcgggtttgggccagactgttcggtaaatacggcagaccccggacccgagttcgcgcgtccagaccgagaaaatggaacctgccggtcggatttatttcgcgctagtggatttcaaagggagatcctcggggggtcacatggcatctggtggactattgctgcggcctctgttcttgcgcctacacgagatccaagctggaaacccggggtttgccggtgctgctcggttcggaggcccttgatctgcaatctgatgcactggcatttagtgcccaagccatgtgcatatgcacggttgaagatgacagcgctagacagaaaatttcgaaatgtaatccgcagtatccgtacataccacgctacccatggtgttccgcgtgctacaaagcccgctaacaacttagcacggagtatcctggagggatccgatcaaatcaaatatgtactctaattttatcgcaacaatttttgagtcaaaggggaaaacatatgattcacatgtgatcgagtcatggaatcatcgacagtactccgtgtagaccggaaaattaaggcaatcaccccacagtaaagagaccatgtgaccatatattagagccggatgggattgttgtgtagctcaggttgggcatttcccgccgagcctgtgagcttagtccaatagccaagcgcttggggaacaaatttgagacatggagagtagcccttagcccaaaaataaagtcaaagtaaattaaaagtaaagtaaataaccggtggtgactcaagatctggggtcagctggtcatcaagtccctatacacaaacaagatccatggaccagtttccaaattcagcttatcatgccatgagatgtacggaggatggtcagctgactatcgcgtctgtcgaactgcgagcggaatccgccgattggtgggtagtggggagacatcgcgagacaatcctagacaatcggagtaagacaatcgcaagttgggagaatattatttcgcagccacaatcctgagttatccgaggtttggaatagttgggtccgagtacgaagaaccaagaggaatgtgctttgcagatgttgtgcaggaatgaatgttgggaccgaaccattggacaccagccacatggcttgatctcgatgtggctagtatttacagaaaccttggaagtgtacggaggaactaagaatggacctcggctgaacaacactccgtccatttcgatgttgtatatttctgggcattcgaggagtaatgactcaccggaaatagcacataaggccgaatcgttagttcccaaccaaaattcagttacgcgaaaatggacaccaaaacaaactaaggtgtggctcagccctagggattcctcctcggcatctccacccccattttccaaattatggccctggtcacccgagtgcaaatcggagctagttctagactatgcgaccgattagttgattttttactgtcttttctaagcgatgtcttgcaaaccttggctgaatactcccggaaatgtcctacagaaatttaaaaaaaagtaatccttattaaatatgcagatctccaacaattcccattgacacccaaaagcccaatgacatagaatatagtatggtggagccgtgtggcttttgtataccgaaagccacaaacttcaccaagggaaagagcagatcagatcagtgggactcggtagaaatgggtgtatgtggtgatacgaatccagtcccgatgcggactagtctcgcacttgggtacaaataaaataataaaaatcacgccaaattggtcaataccgtaaatacttgttcggggtcaccgagctagtgaggtcatctagtacaggcgctctttattaaactccaacttcctcccatctttcaacttcattactcatacccccccccaaatcattattctgactcttgagatcatcatatcaagtaagattcgcttttcctccggccgagtcattctccagaaccaaactcacctcaaccatagtcgtctctattaaagttccagccctctactcttaccattcgatcagcctcccgacgtttccagactcttcgctacctcaagctttgaaccaaagtcgccaaaccagacttcttcaaaagcacggccacaattgatcaggaaatcttaatcggatcttgtgccgtcgggttctataaaagctcgcctttccccggtggcgaacacttacccactttctgacgtcccccaacaccgtgataacataatgcttatgtacccacgtaagggtctcatcaccgatccatacaaccctgagggcatcatcatacaagacgaccaatacccaccggatttctattctgagaacgccttgcactacgatcagtctcgtttgcagtcaccgttccagtgccaccccagtgtacagctctccccgccatcttccgcacctccctcgcctactttctcctctccgaccttctcgacttcttacccgcagacgtctgactgtcagtctttcggggctccttcgatgaccccagcgtcttcatataacccgtcatacgacatccagggttctaattcaccatcgcactacctgtcgcaatatcctcagcaatattatacgcccatgctggtacaacagccgctcgctagtaaccagggttgggatagcaacctgcagttgttgagccctgcgcgcatcccataccccggtgtgcaaaagcgatcctcaccctcggcatcctcgcgctcagctcacgcagggttgcccgccaacaactaccaccgccgctcaaacagcgccaacaagccgctacccaccccggtgcaaacccctctccagaactcattccttgcgactccattccaaagtttcgatccctcctcccaagatggtcacaatgccgaggccgagtctgccatgagaaaagcgatcatggaccaacagaagcagtcaccgcagcaaatgcagaacgactactccctggctccatcggcgtcatcgatgagccataattcaccggtgactccgcagactaccctcgatgaactcgacgatgcatccaagtcgatgaccaatggtgagaatcgaatttctgatattgatttatggatggaccagtacttacatttcgatcctccagaatacaatgccaatggtgccatgtcaattggagtccccaagctgaacagaacgatttccgatatctaccaagacgaattgtacaaccccgccatcatggcagcgcctcagatgtccaagccaatgggacagaatcacctcaacccgcgcaatttcattgccgatcgtcttcaagctgctaaccaaggacacttgtcagctcgttcgcaatcgcctggcggcagacgggatcgctcacctttccgtacttcttccccattcgccggtgatatgagtaacaacgctctccagcagccccagatggccaccagcgtccccatgggacagaacgcaatgaatgggttgaacggaatgaacatggaccagaccacaactggagatatcaagactatgtcccccaaggatgcggttttggatttccaagacaacgatgattccatgcctcctctgttccctccgggtcaggctgatttcaacctgggtgatgcgcttggcttgcgccgcgatactggcccaatgcgaccgatggaagcattccctcagtattcgacacctagcatggcccagccacagttcgcattctctgaacctcagatgcatcgccctcagaacctcttgccgcagggtaccgatttcccttcgctcccagcagtggaatctaccgagagctcgcctccaagtcaaatgaatatgtccattacagagagcattcctcgtcccgacaacacgtcttcggatgcgggcacctacacttgcacatatcacaactgcacagaccgcttcgactctccctctagactccagcgacataagcgcgaggcgcaccgacaaactacaccgggcggccaccttgtcagccgcgatacctcgctccgcaactcccaggctggcccgcacaagtgcgaacgcatcaacccgtctacaggcaaagcatgcaattctatcttctcccggccttacgatcttacacggcacgagcatacgattcacactgctggaaagcagaaggtgcgctgccacatctgtaacgaggacaagaccttcagccgaaacgatgctttgacaagacgtaagttttccccttttcgctttcaccccttaagttgatcatacactaattacattaattacagatatgcgagtggttcatcccgagatcgactggccaggcaagcagcgcagaaggagagactgagagcgccttccacgtcatagtcaccggatcggcatgccgaacgtcatcggtggacccatggtggacccactgggctccaccaaaaatccggggcttcgtcatcatgacgattcagctccctaattctcatgaactgtatcactatgcggcttccgattttattatgtgtacgattttacgttgatgatttgtttacatgcggttccccttttagcattggtcggtgtgtttttttcattttgcgtgttttctccctctattttgtgtctatgccatttggccgggaaaacaaacgggttcggtgttgtacatttctgttgtacatggtgttgctgcattttgaccccagtacagtgtgtccctcttgtactatagtacattcctctaaaaaaaaaatgtatattagcttggatatgacatgaatttggaaatgatacatatgtatatcactctccacactccctccgcactactccacactccactgtaatcgtgaaacaccctcttactttgagataatcaagggatagacttgaatcctcgtacccacttgcatcaaacctgcatgtttacccacatatgccagccataactagggactgttttaacaatctatgcatgtgttgcagtcttgcagatagatgtacattgtctgaatgtatcttgtgtatcgtagaccgattaaagttgacaaaaacaccaatgcagcacgagcaaagttttgaacattgcatgttgtatattgcaattaattaacatcccctacggatgagtcccgattcgcgctgatcatatattgtcctccgtactccgctccgtactctccgtattgcatcaacaatagaaattacctacattacctatcaacacattgtacattgtacactgtaccttcaatgccaacaagaagttagaacaagccggacgtgcaagtaatccatataggccaagagtatgatcccaccattgcgtagccggttcccagaaagccttggaacaatcccgcgcgcatccaaactctggcccgataagcgatttaccaccattctggtacccggtactggtgggatttctggtttgggttttcgagtgtcgacgtacaggaattgcacaagcacaattctagccccttcaggattctggtcccatcttttattgatggagttggtattttgaatgcatatggagtttcataccgatgtgcctccgggagtgtcatgccatatctcctatcttttactgggtgtgaatgttgctgtcattatctttggttgttatcgtcattaatgtcaattgaagctattcgagcgttttgtacgtatttgaaactatcgatctgcaattgtgggtatctatcttaacgtttaccatataccaataataagccgtataggtatatttacgttgtgcaccctgaaaatgatagacaagaaatgataaacagggtgatatacatcggtgggtccatggcttgatagctgtgggtcttcaataccgttgtgtattggggggtggggaggtggagaggtggaacgatggtgggtgtgtggctgaggacgaacttctgttttttaacgtaatctgccgtacaatcggcgttcctcatttattacataggagttcgtatatcggtggtgtgatagatggcttggcggcttattttgacttcagttagttcttttgcgatgcaccggtactatatcccttgcgtggtcgcatcatcgagggagtcatatgagatgtgaaacgtgagtcgtattactcggtaccgcccggcagtattgctatctcaactctccctggacttcaaagataacggcctatgctctgtctcatgcatgtgcatgctcgactgcatattttaatacgagaaaaggcgcctatatcactctacacgtgaacgtgctctgatcggctatagacaagtatgtatgaagcattacacagttcagtgcgacctttggtgtattccaacgatatcataacaactctgactctgcatccctcgctcgcatccggagctgagtatctccccatggaggaattttttgataaaatccccattatttccttaatcgttgcggcatctggcgtccacgtcaagctaccccagctccctggcccttcccagtcatttaatacaattcttgttgtgtctatcgaatacattttctcatcactgagtcgacgccttcaggccccatcgctgcctgatcatccggaaatatttcggatcgcttgttgctttttcaactgattctcgatcctgatgcaccattctctacattgaccaaatcccttattgacatacagactcgtcgtatcctccatcattccaattttcgcggagtctgttttttgctctacctacttcaacttaacccacccgtctcattctagtggcctgaggatctgtttccctatgatcctcgagaccttgaaatgtctacgggatacagatattgcaggtgcctaatggagggatatgacgaatgtctctgcagattttgtaatcgatgtgggagttttggtcatactgccatttactgcagagggaaatcccatgggggacgaagtggagggtatctgagatgctcacgccctacaaacgtgacgccgatgaatgatcttgattttattgacgatcatagtaaggtatgtgcgctgttattctaacgcctactcttcattacggtgctgactgaaaagatcccgtctcaggattcgcccaaagcgctatgcatcgaaaaaggaccgctcgccacaaagatcaccacccaatgaaattccaaatgccaaacgacgaaactggactgaggtggccggcattctaaataagactttgaacctaggacccgttgatcggacctccatcctagagcatttgatttcaaatgttcgcctcgaaatgagcgaaaggtactcctctgtgctagaggagttcgatattgctagaatactcgaagacagtctgagcccagtcgtgaagaatatttgtgaaaagggcaaattcgacctgatcaggcaagtttgacctcgaaatgcagagaaaagttgctaataaaaccttcatggtctcttggaaattggacaggatccagaaacgaaaaaagaagctggtgtatatcttcatattctatggagagaggatgaaacgacgaaacggttttggctttacgtcggacaagcatgtgtgctgtgtcttgaggatccggaaacataaagaccctagacatcgctggaagaatagaggtctacactacgcagtgtgggactctgccgtggatatgaaatcagcctttgtcactttggctattctcgacgccccattttccactaaaacgcagctagttctcaacctagcagagatgtggatgtgcctaaaattccaaacactgacttcccttcacctaggctcctggttgccgaaaagcacaaacgctatatggtcgggtaatcatctcaatgttgcattgccattatggcaaggattcactgatactcaagagaacaaagatatcaccgacgcaattggcggcagatcaacctttcaacaataccttacatctgaggattcagttattcgggcatgggcggaacaaaccagggatgcgttcaacgacatacgaaactcacctgaccccgggatcagaaattactggtgggatcttcacaaagagcgtatccttaaggcacaggacacctggggtaaaaagaaagctagcatggctaagcagtacctcgaaggggccaaagctctcgttacattgcattccggaaatcatggaaaccatcaaactgaggttagagctggtagtttcaggttcactgtttcataaacacttgggcttgatctccatgacggtgacgaagttattctccaatatcatctaaccccgactccacacccacacgcttattctctttcggcattgaaaacagatcctgctacccgcttgggggtttctatccgcagtcaagatagccatggaggttttcattgctggctaaaggcggctggagagtgcaattcacgaaaaatgaacacactcgtggacactctggaaggctattctgcagaagaaagccagagattcaagagacgctggtttgttactgggtctttgaatagaccaaatagtgatattataggaagaaataggtacacttgatattctaaaactataattttcagagttcagaaaagttgcgaagagccaacggattcttagtcggatccaattttggtatttcaaagtcagtgtaggatatccctttatatcgtccgttgttttcccaagagatcccatgttgcagaaattaaccagtcagactaacttatatagctgataacaatgacttgatgaggcaagtgacgttgagtatgtagagttagaacatcaaagaaggaatctccatgacacgtgcaattcagtggagtttcttggcgcgaaaaaagtacagatttgaagcagcgcactaataaaaaagataagagaaaaaaaaaagatagacatagcatgtcctggtttcgatccagggtcctattgtgagttagtttgatgtttgtgagtcaaattgggttcggtgaaacgtacctccgggttatgagcccggcgctcttcccctgagctaacatgctgattggtggaagatatatgcctgacgttcgtgagtcaaattgggttcggtgaaacgtacctccgggttatgagcccggcgctcttcccctgagctaacatgctgattggtggaagatatatgccttgggtaaaatatgtatcatgttttcgagaatttcgagttctatatatagtagctactagtacatatgttatacaaaagtacctcatcatctaataatttatggggtactagcttcacttttagaatatattgactagtactctgtagataattcttactactcaattagacttacacaggttattcacctttcgtaaacatttattattatttttatatctcaaagtagggatatatgattttcgcgggtgctggattacatcccatgagcatgttagctcaggggaagagcgccgggctcataacccggaggtacgtttcaccgaacccaatttgactcacgaacgtcannnnnnnnnnnnnnnnnnnnnnnnnnnnnnnnnnnnnnnnnnnnnnnnnnnnnnnnnnnnnnnnnnnnnnnnnnnnnnnnnnnnnnnnnnnnnnnnnnnnnnnnnnnnnnnnnnnnnnnnnnnnnnnnnnnnnnnnnnnnnnnnnnnnnnnnnnnnnnnnnnnnnnnnnnnnnnnnnnnnnnnnnnnnnnnnnnnnnnnnnnnnnnnnnnnnnnnnnnnnnnnnnnnnnnnnnnnnnnnnnnnnnnnnnnnnnnnnnnnnnnnnnnnnnnnnnnnnnnnnnnnnnnnnnnnnnnnnnnnnnnnnnnnnnnnnnnnnnnnnnnnnnnnnnnnnnnnnnnnnnnnnnnnnnnnnnnnnnnnnnnnnnnnnnnnnnnnnnnnnnnnnnnnnnnnnnnnnnnnnnnnnnnnnnnnnnnnnnnnnnnnnnnnnnnnnnnnnnnnnnnnnnnnnnnnnnnnnnnnnnnnnnnnnnnnnnnnnnnnnnnnnnnnnnnnnnnnnnnnnnnnnnnnnnnnnnnnnnnnnnnnnnnnnnnnnnnnnnnnnnnnnnnnnnnnnnnnnnnnnnnnnnnnnnnnnnnnnnnnnnnnnnnnnnnnnnnnnnnnnnnnnnnnnnnnnnnnnnnnnnnnnnnnnnnnnnnnnnnnnnnnnnnnnnnnnnnnnnnnnnnnnnnnnnnnnnnnnnnnnnnnnnnnnnnnnnnnnnnnnnnnnnnnnnnnnnnnnnnnnnnnnnnnnnnnnnnnnnnnnnnnnnnnnnnnnnnnnnnnnnnnnnnnnnnnnnnnnnnnnnnnnnnnnnnnnnnnnnnnnnnnnnnnnnnnnnnnnnnnnnnnnnnnnnnnnnnnnnnnnnnnnnnnnnnnnnnnnnnnnnnnnnnnnnnnnnnnnnnnnnnnnnnnnnnnnnnnnnnnnnnnnnnnnnnnnnnnnnnnnnnnnnnnnnnnnnnnnnnnnnnnnnnnnnnnnnnnnnnnnnnnnnnnnnnnnnnnnnnnnnnnnnnnnnnnnnnnnnnnnnnnnnnnnnnnnnnnnnnnnnnnnnnnnnnnnnnnnnnnnnnnnnnnnnnnnnnnnnnnnnnnnnnnnnnnnnnnnnnnnnnnnnnnnnnnnnnnnnnnnnnnnnnnnnnnnnnnnnnnnnnnnnnnnnnnnnnnnnnnnnnnnnnnnnnnnnnnnnnnnnnnnnnnnnnnnnnnnnnnnnnnnnnnnnnnnnnnnnnnnnnnnnnnnnnnnnnnnnnnnnnnnnnnnnnnnnnnnnnnnnnnnnnnnnnnnnnnnnnnnnnnnnnnnnnnnnnnnnnnnnnnnnnnnnnnnnnnnnnnnnnnnnnnnnnnnnnnnnnnnnnnnnnnnnnnnnnnnnnnnnnnnnnnnnnnnnnnnnnnnnnnnnnnnnnnnnnnnnnnnnnnnnnnnnnnnnnnnnnnnnnnnnnnnnnnnnnnnnnnnnnnnnnnnnnnnnnnnnnnnnnnnnnnnnnnnnnnnnnnnnnnnnnnnnnnnnnnnnnnnnnnnnnnnnnnnnnnnnnnnnnnnnnnnnnnnnnnnnnnnnnnnnnnnnnnnnnnnnnnnnnnnnnnnnnnnnnnnnnnnnnnnnnnnnnnnnnnnnnnnnnnnnnnnnnnnnnnnnnnnnnnnnnnnnnnnnnnnnnnnnnnnnnnnnnnnnnnnnnnnnnnnnnnnnnnnnnnnnnnnnnnnnnnnnnnnnnnnnnnnnnnnnnnnnnnnnnnnnnnnnnnnnnnnnnnnnnnnnnnnnnntgacgttcgtgagtcaaattgggttcggtgaaacgtacctccgggttatgagcccggcgctcttcccctgagctaacatgctcatgggatgtaatccagcacccgcgaaaatcatatatccctactttgagatataaaaataataataaatgtttacgaaaggtgaataacctgtgtaagtctaattgagtagtaagaattatctacagagtactagtcaatatattctaaaagtgaagctagtaccccataaattattagatgatgaggtacttttgtataacatatgtactagtagctactatatatagaactcgaaattctcgaaaacatgatacatattttacccaaggcatatatcttccaccaatcagcatgttagctcaggggaagagcgccgggctcataacccggaggtacgtttcaccgaacccaatttgactcacaaacatcaaactaactcacaataggaccctggatcgaaaccaggacatgctatgtctatcttttttttttttgcgttcttcgctttcacggtaaatttgcggtatcatataggattctacattgactgtagctcaagccattgcttgcatgtcttcttttggactttgtatagctttcttcaggtctctcctaaataattaaacctttatatggaggatgtgctggatatatatcacctcttaccttgttggtatctagatgtacttttgtaattgtttcatgaatcgcattaaaaccccaactattcaaacttcatatcagcagaggtattgcgatatcctctaaattactgatagaaaacagtcccaatattttcccaagtttggtaatagccctacatattggtccccatgccaacttactctgtttaattgggtactctcgttttgatcgagtacaagcaggcctatctcgatcacacaattcattattctcaaacacaagagtttcatgctgtggtgcaacttcccgctgcctcaggccatcaccgacatcaccagctctacacgacacttagacacagtggaagtgcttgatttacgtgctcctacaatcaacgcatacagtgttacactctgggcttcatatcctcgactcaaagttataatttaaagacttcaacccatcgccgatcatcctgggggagcggaactccaaagtgggggccaaagagcgggagtctcctatctggcatttatatccatcaaagaaacataaatcaactccaatcctgttgatttccccagcataaataagactctctgccttcataaccccgaacatccccaaacaagcaaattagccagtgtcggggaaaaaagaaaagaaggaaaaaaaagagggtcactcagccaacctgaaacgaaccacaagcccacaccaacccaacccaacaaaccaccctatacagacaaaatgggccaaaaggcctccgtcccacaaccgggcgcgcaaattcaagtcatcggcgccgggctaccacgcaccgggacctcatcattcagcgaagcgctagaaatcctcctaaacggaccggtgtaccactgcggcacgcaaatatcgaaaggcccacctggagagataaaaagctggatgccaattctgcaaaactggctcaaaaaagacgacagcgcaaggcgggaaaatatgctcaccctcctgcgccaccaattggccggctacgtcgccatcaccgactccccaggctccgagctcgtcccggaactcatggagctgtacccggatgccaaggtcgtctgcaccacccgcgaccccgtctcatgggagaagagtatgctccacgtgcagagtttgactggcgtttggtttgcgcgtgctgtcctgctcccgctggacgggttgagacattttatcccgtatgggtatttgctggcggcgctgtgggagaggctttatggtggtgttgctggtcagcatggtcgggagacctatgcgagccatattgcttggctgaaggaggttgtgcctgcggataggttggttttctttgatgttaaggatggatgggggccgttgtgcgaggctctgagtttggaggttccagttggggtgccgtttccccgtatcaatgattccgaggctattgagaggtctattaatcatcatttacggaggggtcttgcgcactgggcttgcatatttgctgtgtttggtgttggggtggcggctttccgcatgtggaggtgagacgagggcgagacaattgcatacatgtgattgaaggataagaggtgatcatttggttgcggagttggtattttgaattgtgcgattttggaaactctttggttggtcaaactccaacattcagcgacttgcatacattggattatgttggtttcttcaggcccaggtggagcatcaggcaaaaactcactacgatagatcggcttatacagtcatttacatagccatttacacagaataagatatatatgtcctttggaacatgcattacaatatatgaaacgaaataaattgcctaaatgtcacaaataaaattttgtacgccaacttttgaactcgtaagcataaatccgacattattaaccagttcgctcgagcgatgccgagctttcccttccactatcatttatttcaaaggtagtttcgatcttcgtgtgagtaaagatcctgtttttagggataatacgctccttgctggagttggccccgccaatgttgttacccatgggatcatcatccttgctgtcgaccgtgaacatagtgaggctgttgggatccctggccttggagaatctagatgcataccacggagaagtgttgttgcttgaccatgggttatacttattcccactgctgtattcgccgatgaagcgaggcacgaagtgggatgcaatcgccttgaatgacgggattgaggcagcgaatatgccgacgttggtttcgataacagaccaatacatggaaccgctgatgacgtaggtggagtccttcgagctaagcatggcaggaatgtaggtaattcgaatgatcgaggagatgcaagcgctgtagattaatccgttagcaagcatccaggcggaggtacttgggtagacttacaaaagaccaagacagaggataaaggccaggacaaacttctgtttctgaggcatctggagatggaagattaccttgacgggcaaggtataagtcatgagatcggtgacgatgttcaaggcggcgttgcatagatagaaaatgttgatgttgacgcattttccagttccagttccagtccaggccatgctaatgggtcgacattggaatgcagccacgagaacgaatgagatggcttgtgctgcgattactcccatcataacccaggataggcgagtgagatagcgatctccgaggcgagtatagaaccacaggacggaggttttgacgaatccaagtgttgcgagatagaacattgagctcagccagacagcctggggaaggttagaaatgcaatgctgtacaatttcgggatacgcatccttacaaaagaatagtcgacgatcttggtctggtcgacatccgcaaaatgttttccaagtccatgtttgaccgctaattgatattagttgctgcaaaaagtcgtaggaaaagctagaacataccgatgattacgacagctataaatgcccatgacaacgcctatttccattagtatgatattgtaatgacaatgtcaatgtctcttacacaagcgcaaataatgaggtctggaagatgtcagtatggtgttggtaaaatagatcaagcataatctacctacagtcgtcaacgcccatttggcccaagacataaaggcgtgcgaagagacgaagagccaacacaacgaaggtcaaggtggcaaaggccacacagacgcccacgaccatagggccttgagaaccattggcaccagccatgacgaggaatatggatgatacaagcagaaataaaaagagagagaaaagaccgtgagttgacgtaaagaaggaattagactagatgaatagtatagatagttgtttcacatatcccatcgagaacgaatgatcaaatgattagtgtaagcataaacgaaaaaaaaaagaaagaatgattagcggtaccccagcttatgggctatactacacatatttatccctaatgcccctggtactagtttgaataaaagtctgcgcacactacggatgtgaatcctgcatggatctagtagccttggagatccactgtataccataaaaaaagccacaaaagaagaaaacatcgtaacacttctgaagccacacgagacagactatccccacaactaaagacattcatcgacctattcgggctaaaatacgcatgccatttatgggtaggctcccagtctcaagccacttacgaaaaacaggaagagccctaaggtgggttttctagcgctgtgatttgtcactcagatatctctagttgtaggtgcaactgaatcatgctttggcaaatgaagcagcaatcgtttataggaacctttgttccgggacaatgagtcattgtgtataggcagtaaagacatacacctgatcgagttggattggctcgaacaagtatcgtgggtcgacacatttgtctcgaagacgattattatcattttctaattattggaaagttcaccaagtagaaaatccttatagccaataaggaagcaggaaaaacatggaagaatagaaaacgagagtccgtgagttcccgccgaggtggagagatctgatttatttttgttctcatgcgatcgagatgttcgatgctgatcaatatcttgatactaatattaaatagtaactagtatgtcctagagtgaatacgttatacggagtgatattgtgcttgtatagtcccgataaccctaattccgacggacaaaagcaactagaacatagcaaacccagcggaacattgcttaaaaatttagacgaatcctgccagatattaataatgtagaggaggagctcaccgatctaaacgattcagaacccggggagctcttgtctatgcgcctaattacggaatatgacggagtaacggacgatggatggcccatagtttgaagcctcacctcgatctggacgactccagttgccttccgagcccgttctgagcggagagtgggtcgtttaataacttcttattaagcgagattggctaggttaactagttaactagaatgtgaagcatcggtgcatctcatatgacatcaaaaacctacactgcacattcttcaaggtacaaagtgtgaggaaatggaactttaatagttactgcgtacatatcctatgttgtacatatcaagagccttttcgcaaatattcttagagatcgactagcaattttttatcctactagaagtgcttccaagccaacaggattaagaagcacgatactccgtatactccgtgcaaccatagaaattatccgctttagcaaatagttgatcactagggcttggtctgtctcatacaataaacctattttatcttttcccctttttgggaaaccagtggagaatcaaaagtcggagtctaactcgttccgagtctcctaccgcgttggtgccctgactagtcaacgatattaattccctcatctctaaatgttgaaactaggtaccttttgtatgcagatgccatacgaaaggtacaaccatagaaaagctacgatatcgatttccccaacactcaactaactcaaaaataatggaacatactccgattggaccgttcatggaaaaacactatacatatagattatatggcacgatcttttactttgtgtagttgtggttcgaatcctttgtgacttttgtatggaattccctacaaaagatacctacttctggaatttattggaattatcgtgacagccgagatattccgatttcctgccacgattgttgtaatccgggttgatgaaaatttcgcacgagagccatcatctgcaactttatttagtcgactccatatgaggacagagaccagtgagaaacactggctatctgtagtggagaacgccagcctcccgctccaccttagtgcgatgtactccgtcattccggtctggcccagtgcaaatgaccctagagaaccttgaaaggctttgactcacacccggtgagaaactgccgagcaactaatcccctgcgctggttgttttaaatgttcgtgggcaacggcgcctctgaacggcgcgcaccgaacccgcacggccccttgacagttggcaacgtctttctccatattcagaatatctttactattctaggctactaggcacatcacgacgggatgtgtgttttccaggaataaccgcaacagtggatcagcccaaagacgcgattccttagcaagcggagtcgcaatccttcgacgatttaccgatgcccttagcgcaaggactagcaccaagggggccagatgcacgagctgtcacacgccgaggatattccaaccgttgagcccaggtttggtctaggcttgattccaggcaaataccagcatcgtcaggtgttgttagctcgacatagccttggccaatgacctttgggcccttactactacaacgaatatgctgtttagtgcgaatattcatccgcggtccttcatttccggaggggttacttcctccctctgtcaaaaagacatgtctgcgtcctccatgcatctgcatccctaatccgccatgggtcttgcagaaaatgtcctgtcactggtgacggtgaccaatgtcattttgagtcttgtggcctatgtcacgctcaagtttgcctggcaagttatttactatcgcttctttagtccgctcgcgaaattccccggtcctttctggggctctgtaactcgtctctggatcgcatggcataatctgcaggagaccgaggtaccaactgtttatgcacttgctaagaaatatggttggtcttgattatatatccgaaagaaatggctttctaacaagtggacatcttaggccctgttgttcggatcaccccaacattgttgctggtcagcgatcatgaaaagctcccggaagtctaccaccgcaatgcagacaagaccggacactacattaccggaagctttggtgagaccgagtctctgttcaacatgaggtctcataagacccatgccgtgttcagaaagcacgttgccggaccggtatgacgatatgcgagttcaattgcagatatcaaaaaatgaccctcaaaatagtacagtttcagcaacatcaaacaaatggagccactggttgatgtgcgcatcaccgaatggaccaccaggctcaacgaaaagttcgcgaagagcggcgaagccttcgacttcgcctggtgggcagtgtaagcagcgcacgcgccaaatgaaacaatgctccgactaacaaaacaaccagctacatggcctacgacatcatcagcgaaattggcttcggcgagcccttcggcttcatcgaaaaaggcgaagacatcggcggcctaatccaaggcttccacgacggcctcccagccttcggtctcctagcccgcctgcaccccttcacctcatgggtaaaaaccaccttcttgaaaaagtacctcgtagccaaaccagaagacaactccggcatcggcgtgctaatgcgtttccgcgaccggctcatcgaccagcgcatcaaggagatcgaaaacggcaagaaaaccgaccgcacagacctgctccagactttcctcgatgctctcacagaagacggaaagcccctcgatctggagtacatccgcgccgaggtcctgctagtcctgctcgctggcgctgacacaaccggcaccgccttccaggccatggtgcagtttctcatgacccacccgcaggcgtacgagcgtatgatggcggaaatcgataactccgcccgcaagggtctcatctccgatatgccacagtacaatgaggtcctggagcacctgcctttctatgttggctgtgtgaaggagactatgcgtctgtgtccgtctgcgccgaatatcttcccccgctatgtccctgagccggggctcgatctttatggtcgctttgcaccggtgggcacggaggttacctgtaacccgtacctggtgcatcgggatccgaggctttatggggatgatgccgaggagtttaagccggagaggtggttggatgctgagaaggcgaagttgtataataagtataacttttcgttcgggtatgggtcgcgtgtttgtttagggagggatattgctatgatggagttgttcaagggtcctttgcaggtgagtctttttccggctgtgctacgtgctatcctggggcgagtgctgatttatcgtctagttcttccgtcaatacaagccggagactgtaaagggtaagcccgaggctaagctcatgaccaaaggtggtattagctactggagagacgtgtggttgaccatctctccccggtcagaggtgaaggccgagggaaggcttgattgaaggttgggtctacatacagacagaccggaagataatgccggtctaaaaaacgctacattccatttgcacaggatacagctcaaaaattttcatttctcaaaaattcaatatcaatttcccggttctgagtcattgccatccatatacctatattgtgtttctctattgtagtgtcgcgcagaaccaaagcatgcgatcgtgctcatttgcccacgcggcattcttgaccttggccagttcctcgccgatatatagccccgcctcgacgctccatcgcgtccccgtcgcctgacccacatcgtaccagaagcccttgatcgtctcgacattatgtcggtagttagatcctgccgcgacgtctttcatcgcataggatccgcccagcgtattccctaactgacgcgcgacgatcatcaagctgggtcgacggcgacagagacggaccatatgcgtcgcgacgcggacctgctggtcatagtcccacaggtggaagagcgagctcgcaaagacgacgtcgattttcccggctaatttctggaaaatcgggctcgcggggtccagacagtcgggcgagctcaggtctcccacggcgaaagtggcgttgagacggtctcgatcgcggaagagctggtatccgagatcgataaacggttgctctatatcacatccgtagagctggtcgcccgggatgccctggtcggcaaggaaacggatctcctgaccgaaacagcagccggcctcgaggattccggcggttggatcgtcgcggagacgggccagtatgcgctggtagactggatggtggggtagctggaaggtgaggaagcgtaactggccgatacatggatagtggaagattgagtaggcttcgtcgcgctacggattggagatattaatgattgttagctatttgagagactcaaaaaaaaaaaaaaaacaagggaaaagcaagttgccgcgtacgagcttcaagacgtgcgggaggatctcgtccggatggaagccgctgtagctttctagcagcctctgggcctcggggttgatgctctggacctcctgctgataccattcgggtttcttctcggaccccatgattcttcttcgaaggagggagtaggtatcacaggggatgatgatagatgaataaatgtactgctatcatggctgccttttgtagtgagaggcacgccttaagagacctggtcgcagatcattgccgagtatcgcaggtggccatgcagtatggactagatctcactgttccttcggagatttagcggttgaaacaagcctgtaggctgatttcgctccccacatagcgatccttgcctgtgctcgctaatacagccgtttctgacctttaaagcagtcattgtcggtgtcaatcccactggtcctcgtattctagttgtcaacgggggtctaagatcaggcaaaaaccaggcattcaggcattaaatgcaggcatgcgaccttacgcgctataactacaccgtcgtaacccccttaatacagaacatggcctcctggtagattacttgcatgcctatgaatctttgcgttaccgcatttacctacgcgtcgaacctgcccaagtctttctctgcactcaacatcatgatgcgagccgtgcgaaacgcctggactattgccgcccatcggggtttcactacgtctctaccctccattccttgttaccgaattccccgacggtctagtccgagagccatagttgtgtcgcatcgaacaattatgtcgccgccgcagtggacatgcaccccgaaagtgttccctacctcgggactcgaattgcttgaccaatccatcgagcttgaggaagagacactgtcggattatcaaccggagaattattatcccgtcaaccagggcgaagtattcaatggtcggtatcaaacaattgccaaaataggatacggagtaacctctacagtttggcttgctgtaggtgtggtgggttcgcttcagcccaaccagatgatatggttctgatagcattccttgaaccagtgcatcaacatatgttgttctaaaggtttacgtaacaggccaaaaccaggcctgcgagcgagagctgcacatctacgagcacatgaacctggtggaaacaaaccatcctggcagaaacttcgttcgcaaacttatcgaccatttctatatacagggtcctcatggccgtcatatctgttttgttcacgagcctctcggaacgagtacagatattctagtgaagatgttctccgggcacaaaatgagccttgatgagatgaagcccggtatccgacagctacttatcgcattagacttcttgcactcggagtgccatatcatcaatactggtaatgatcaatccgcctgacgacttcatatcataggcctaacactgttacagatattcagctgaagaacttactacttcctggaccggagacaagcgttcttacccgattcgaggaagctgaagttgcagacccatcacctagaaaaatgctcaaaaaccgaacaatctacaagagcttaggtttccttccaaaaggtgggctgccgatcctcgctgattttggggaagctcgattgggcgacgaaggacatagtgatgatatcatgccaaacgcttatagagctcctgaagtgatgttgagatcgaactggggttataaggtggatatatgaaatgttgtcatggtcgtgagtggaagattctaacctttttaacgagaaaatgctaaaattttatatttaggcctgggacattgttagccctcgcacccttatcagtggcaaaaatccagatggcgtctttgatgaccgagttcatatggcggaactggttgccttgctaggccctccgccacctgtattccgggaacagagacaccccagttcggtctactgggatgagtcaggcaattgaaaggaagtagtcccaattccagacatcacttttgagaggcttgctgagaaggttgaagggaaagacagagaagggttctggttcttgtggtggcttcggatggccttgcagtgaaaccccgaggaccgggcgacggctttgaaactcttatacgacgagtggctgatggaggggctgtgatgaaagggctgggggaatgaggcagggatgagcaaatagtgggtgaacagaagaaaggtggcagttcgatatgtaccctactcaaccgctgcataagtattccaaagctatggaataatagccttatgctattaatgatattacaggaaccatcatgaattacacaagcgaaaaaatgtcactcaaatggcgctatacctgaagtacatagtttaaacaggtgtgcaaatagggattctcagctaaaacatcaaatagatttgtgggttgaggatgtgccagcctccatgtaagacagaaactggtgtagcctggcatcgagcctcagtctgcatcgcagagctgtacgcaagaaagtcgccatatgtgatagttgtagctgggtccttgagtagacagagctcaccgttccagatattgatgattgtatcgaatcgaggcagatactgcagctcctgaaacatcatgataagcgcggtgtatgggggggggatgtttcccttgagttctctggtcactttgtagcgatatgccagggtgttgatgaattcctctgggtcgttgaactcagagaggctggtaggacggagacattgctcgacagcagtaaaccattcgtcaaaaccgcctctgtctttaagaggtgcgaggggacagaatatgccgaaagtgcctagctcgggcagatgggttgactgatcctcatcggcagggttctccaaacaagcttcatcccagtcgcgcttgtttcgtgcgcctgggttagtttttgtgccaggtgcacctgtggcttgagcttcgctgtcactcattgtgcatcagaagtgttgttttagagaagtttctcgaaaggtggaaaggcggatgagcttacagttcggtaagacaaggggtggaaaccaggggagatgatagatggttgatggaagaagggaataagatacgaaagagaataagaaggttaaaaagggagagatgaccttagaagagaagacaagtgtcgaggaaggtatggacgtgtgcatatgaagacagagagcaagcgcctatgtagtgcacttaggatggtgaatagccaacctaccacgcagttgagatcaaaacaaggactgatcctgtctctaagatgccatgaatgacaacaatatatctacagatgttctttaactgctcacctagttgatcttccttcctctctccatggtgtctttccatcttgccttctctacacaaagcgtaatatggagtatgatacaatcaaatggaatatgtaaatgagagctactgtatgaacacgaaaaacaagatgtaagccaggacaaattttgttgaatgcttttagtaacccgacacccaccgctagtacattggaacatggtatggcgtcaaatatggcagatagagagaaaatcccgagacattcaggatgcgttcatgatcattcagcagtacccatgacggcatcctaaacaaagacagtgaatgttagtaacggagctagagagtatgggtatatcaaggtgtttgcttactcttgcctcatggtacaaaggagtgataccggtccagtgaacaaactggtgcacaccctgtccaacaagagcctccagtccagggatggtactccaacccgcatcagatgccagctgcatcaaggcggtgacagtaggcttgtaggccatctcaagaagaacacggtgcttgccagcgtcgggagacttgccgatgagagtgccatcgacctcctgagcgcgctcgaacatgtggcagagcgtctcgcgcatggcagggtcgatgggacggtcggcggggatcgtgccaatagcgacccggggaacggtgtcaagctgggcctggttgtctacaacgcggatgttgtaggtggtcgggaaggtcgagaccataccctcgagcttgctggcgtcacggcccaccacgtagattggggagaagtgcatgtggtggagggcgaagatggcagcgcgggcagtaccaccgccgccgatgacaacagcactctcgttgccgctggaaccgtaaattcctgtattccgcatgcatcggatcataccttgccaatcggtgttgtaaccaatcagacgagggggcttgtcgccgttggggacgggcacaatggtgttgacggcgccgataatttcagcttcctgagcgacttcgtcgagcaggggcatgatatccaatttaagggggattgtcaccgaggcaccaccgaagtcaggggcgcggatgaactccttgaggtcttcgacgttggcagtctctagacgagagtactcgtggggtagacccattttggcgaagagggtattgtgaagagcgggagaccgcgagccggagacagggaaaccgcagatagcgaacttcttggccttgatctcacccatcagggagagaccacgacgaatctctgcagcggacagctgaccaggtgccgccttgaaaggaaggctggggtgagatacaggggtcatgaagccgttcaggatacggctgagctggccactgtcgcccatgttgatcgcaattagcggcacgtcgtgggcttcttcagcccatgtcttgaacttccgaagggcagtgttatcatcaagggtattggcaacaccgacgagcttgatgatatcgccgtactcaagagcacggttgtaggattgcatccaggacatgttggcccacgatagagtgcccttgggatcatggtgcgaggcgatgatcttagagtaacccttcatctcagtaacggcacggagcattgcatcggggaacgcgatctcaagatccacgaattcgcacccagaacggaacgctagtcggtacagctccattgccgcatcatgagcatcatcggggaagcggccaccttggctcttggtgcggatggtgaagatgagcggcaaggtggtacgacggcgaaggaaagacatttgttccatgacgtagtcaaccgagggaatatcgccgtcaactgaagggtccttcaacaggtcgacccgcagttcgacagcatcagacccgacacaagcctcagtgataatatcgcccgatggttggagatcaggcagagtcaatgagacaaagaagctgtgcttcttcttcttgatgagactaaggctgtctatttggccagtgactacccgcatgaagcgggtaaagtcctccgaggcaagggctagctccgttgaggtcgagtgctgactatagtactggatgttgctgcacttttcgaaccaaggcttacgtcgtagccacacgcccatcatatcctccacgtaggcagggcgggtcttatcaacttggaggaagtccatcaccagcttgatgttgcgcatgatgaggagcacgttgcccttgctcttgtggtagtcggtaagtagttttcgtgcctccggcagttcaacaacacctccgccgcaagcgaaggcatagccagtaggatgatccttaaggacacgccgaaggacagcgagttctgcatctctgaatccctcccagccgcgtgtcttgataatatcggggatagtcgtaccctcggaagtctcaagctcagtatcaagatcgatgaaccgacgaccaagagccttagaaacccagttgccagtggtggtctttccagcgccacgcatcccaatgatgaagatagaggcgctgctccgctccacttcgctcgagacagcatgctcggattcctccaattcttttccagtcaggttcacgctgaacatttgcttcaaggtgtcccaccagccaggccaggtcttaccaacgcattctttctctagaataagggtggactggggagcgacaagagacaacacactgaaactgaacgcgacacggtggtcatcgtaacagaaaataccaccggatggctggcgaagggtggaacgatcaataccgtcgatctcaagcccgtcgtcatgctcacggcacaccacgccgaatttggccaattcatctttcatagccttgatacggttacattccttgacacgctgatttgcgataccgtagatacgagttgtgtggtttgagcccttgccccgggcaacggccgcgagaacggaggcagtaaggaaggcatctgtcatgggctccatatccacattaggcagcggctgcaaaacgccatcagtaggcccagtaacagtggtggaagtatcggtctgtaaaacggagcagcccataggccttagaacatccactgcgaaacgagcatcgccctgaagggacttggaaccaatgttagggatagtacaagtcgtgccagtgagggcagcaatggccaaaggataggtcgcagagcttgcgtcgctctccacaacatattcagcagggttcacgtagtgagcctgagggatgtggtaggtgtgctcctcggtagtagacttcttcacgtcgatgccgaaagatctcatcatcgcagtcgtcatgtcgatataaggctgtgagatgggcttaccaccgaccagcttcaacgtcaccggctccttggcgtatggagcgcacataagcagcgaggagacgtactgagaggaaactttagcggccaggttgatctttcctcctgcaaaacctccagaagcggcgatcttgagaggaagacatcccttgctttccatgtactcgacaccggcaccgttgacggtaagagcgtcgacaaggtcgccaataggcctttgcttcatgcggttgttgccggtcaagacactcgagtcgacactgctgggggtagcgagtgtagccacagtggtgaggaatcgtgaggcagttccggcgttacccaagtacaaaggcgtaggacttgcgatgatctttccgcccttgccgttcacaacaagaacttcaccttcctcctcccaagagaaagttgccgcgccgagtcgctctagggcattcagcatgacctcagtgtcgtcggagtgcaagagattcttgatgcggcaggttccagaaccaagcgcagcaagaacaagggcacgatttgagatactcttcgatccagggggtgcgcaagtgacattgagcgacttgggcactccggggtgaacctcaatactgggagcaaggacgacaccaatatcctcattagagacgacactggccttcggctcgtgagtacggccgattgctgacaagagtacaaccttctttttgggaccatcattcttcttgtccaaagccatgttgaacagcaactggtctactgagcagtgcttaccagcagtcaacttacgaacccgtggatctttcatggaagtgggcaagccgtaggccgagaggcactttaccacacgagcaacggcgactcccttcaggatgcccaagtgtctcgcaagctctgcctccttcaccatgccgattgcgacacattcgccgtgaagaatctgaggcgtaaggatcgcctcaatggcatgcccaatagaatgaccccagttgagcaggttgcgaaggccgccttcacgctcatctgcggagacaacaaaggccttgtgacgtgctgatgccaagattctagccttcaggatatcccggatgtcgtcgaagcgaccttggccagcctttggctcgctgcgcacagcagccaaaattgaatctgcgttatcttccaaggcagtgaactcctcttcacttgaaatagcagcagtcttgatgacctcggccatgccattgatgaactctcggacggggagagtctcgaggaactcaagatcaatgtagattcttgatggctgccagatagaaccaataaggtttttaccaagcggagtgtcaatagctgtctttcctccgattgaggagtccaccatggcaaggagggtggtcgggacctgcacgaagcgcacacctcgcatgtaggttgctgcaacgaatccagtcaagtccccaatcacaccaccacccaatgcgatgatcactgtgtctctaccacatggtggattctggcttagcatccaatcttcgatgtcggcttttgtctgccgtgacttggagctttctccgggggccgcattgtggatgaggagccgcgggggtggggtgatggaagcagcggcagcctcaaaagtcttttggaaagtaggggtatagagagatccgaggttggtatcggtgattaggacgtaggtcgtcgaggacaagccactgatcaggtcctttgcgacaaaattgcgccaaagaccaaagtcagcgacaatgctctcccggcccaagatgctgatcttggtgggttcagacattgcggaggaggatatagataaggacttggtaatggcgaagttcaatgactgctcaattcattctgtgacttgttagtaccctgactcacggtactttatctgtttccggccacaatgaatctagggatacaaggtgcacaccgatcatttggaggagagtgaatgattagaggagtttgaccaacctggacaaagcttatccaagagccagtagtgtatcaagagaatataatctccaagtcaagaaccaactagacagaaaaggaagaagagtattgctgcccctccggtgtcgcgggcagtttcttgaccgcccggtgactcaatctatcgatctatgatagttaagcccttggacgtcatcacttacgatttatatcataaaaacatgtacctgcaactttgcttctaattttaatgagttccgattcagactacgaaacaaatgtcctataaaaatttgccaacttctacatttcgatctcaactttcaacttagccgacatcgcctgattcgatcgcgaaccctacaattagagagtacagggatataaatcagccttagaacgatatatagtagctacctacccaggccgtgatatctcgtggcatcacgccgtgaatcaccgaagttcgaattcttctttgcctggctatttacacatgaatacctgccatcactcttcctcatcctcgtcatcgtcctcagcctccgagacttcctctccgagttccttgagccgttcctaagataataattagtcagatccccagaagcttgagaaaatatctggccagtaaacataccttgtcctccattcgcttagcctcaaggtccccaaagacaatcagcaggtcttccagttcagactgggctgactggcgagcctcctccttttctttggcttcaattttagccttgtcgagctgggcctgcatgcttttgagggcttcggccgcactacgagcttgagactcggcctccctagccttttcctcggcctctttagcccgtgcttccagcgcagaggtctgagatacggtgccttcttgggctgtttcaagatcgttgctagacttctgagccttggcaaggtctgactttagaactgcgacagactgctttagggttgcaatctcagcctcatgctcttttttggctgcggcgagatttgactcgagagtcccgactgtattattgtggccggtggattcagcctcatatttctgcttgattgtagagagattggactccaagatttcaactttgctcttgtattcaccgacttccgcttcgtgattttgcttggctgcggccaacgtagattccaggctctgcaattttttggtaagatcggtgacttctccatcgtgggttcccttgatgctttcaaagtctttgatttgcttgttgaggtctgccaccagtccatcattgcttttcttggtattttctagctcctgaatcttcttttcaagatcggcgacctgtcccccgtgggccaccttggactggctgatcgtgttctgcaactcctggatctttttgctgaggttatcaacttgaccgttgtgggatttcttggtgctttccagatcttcaatcttcttttgaagatcagtgacctgtataccgtgggcctgattggactggctgatgacagtttccaactcctggagtctcttattgagattgacaacttctcctgtatgttgttccttcatgtgagaaagctccgactctaagccacggatagtttgctgcaaaccaacaacctctcgctcatgatgctctctcacttcctttgctttgctgctcttgttttcagattccaccgaagtttgtttgagctgatggtcgatggcacggagttgatcattgtgctgcttaagtaactcattcttgtggtggttatgttctttttggagcttcgatagctgttgggatagctcctgcgcatggcgttgctgcagagataggttggtttgttgaatctttgacagctcaatcgcgttagattcctttgtctttcggtggtccaactgttcttgatcaagcctccgctgaatgctaacgagatcagactccaatgtttgaagggtctgggtgcgatcttcaatttctgcacgcaatgaatcaacaagctcacgtgaaattcccttttcgacgccattggcaacaacagaaatctcaaacccgggttcacggtcaatggcacgaagcaatcggctgaagttatctttcaggaactcgatgaatgagcggtcaaagaacacctccggcagtccaccctcgagttgactaccagcggtttgaggaagaacctcaaagtcgcgaaccaatggacattcacgaagtcttgtgatcttatcaatatattgttccctgccaagctgttcaatgagtagtttatgtaacgtgatgcgagggatcggcgaatcttttgtggagaactcatagatgacacccaacaggaccgtgcaaaggccgggcaccaatttactgggggtgcgctgatgcttgatttcctgcaacaaggtttgaatgcagctaccctccccaagaagatcattcacgacgtctgggtcttcaaaaagccatccacagagcaacatcagataaccgactgtgattctttcgtcatcgccgcgctgcagaccagtaatcaggtttccaacgacggattgaacactagtgaccacttcttcgccgctctcagcgtcaccctcggtaacagccatagctattgccttcgcctctgcatcatcgaagatcaaatggaacatcagaacacaggccatccacacctgatatggatcggcatttcctcgcgcctccggagcagtgagaagtacagatagaatattaggaatccgatcctgcccgctggtatgcccttcaatggctcgcctgagcacatgcatgcgaattccaggatgatgggcgaaaaatgctttcatacattcgcaggcagcaagccgtgcgtctaaaaggttgttgggagcaggttcgaggctgagctttaaaaatgcttcaatgacattgatgcgtaaaggttcattcgcatcaccattgacagccttgtcgccgcgggggtaggagccccagaggacttcgatatcaccgaatctttcctgcaacggtgagttgccgcgaatcagatcggcacaagttgacaaggcctggacttattagacaaaggtacagacaagggtgggcaatagcaatctcaccttcgaagtcacgctaacactgaatctttgtccaaatgcaatgctaagaacttgctctgtcacgccattctgccaaaatgcagtctggttaatgggtgtactcatgccaccgcgaatcaaaaacaactggatgatggccaataggccccagacattcttatctcggtggaccagagtccactgtggcgccggctcattgtcttttggctcctgctgacattcatgaagcaaatgtgttactcttttcacacaaccggtctcgcggaaaaacgattggttggaaacattgaatctcaacaagtgagccaacaaggagaggcaatcttccactacctcggtcccatgagtcaatgctccctctgcttcaataagcgagaaaagtatttcgaatgcattctcgaatgccacaagcttttgcagctcttccgaggcgggggtcagggcaattaacaagacgagagcctctagcagaaaacattttgtcagctccaatcttccatgtcccacaaggacgcacaaataaaaacgacataccgttccgtactggctccctcgcatcagtcagcacattgactagtttggaaataccaagtggcgctgtaaaaatgcattcttgtgttcgttctggtcgtgcgctgcaaatgtgggacatcaattgaagcgaataaaggcgggagtagaattcacgggcttctaaaaggttgagtagggtagttatattatcttgtcgctttagaaacgttagtccatcatatcagggccgaggtcacgatgcgtacctgagtgaattcatctgccagccacagagctatttcgtccgacgcttcaggctaaatatatatatatataagcaacccgaatgaaactcatcagagtacaagatacccacactagattcatcaggcgtgaacagcattagaagggtctcgaggaccactttgatggtgtccacatcctcactgtcattgcgtagactgctgatcaatgaccgcaggccaccagaagcgactgatgcagggtagagttttgcaaagcttcttaatccctgaattgctgcccggcgatcttccaacaatgtagcactctgcagtctactgcttaatacgtcgattgtgtccgtagccgtttgtttggccggagcttgcgactcgaggattcggaacatggtagttgattcgcaatatcatgatcactgccggccgagggcgtaggaattggtaatcatctatgagagatctatgagagagcaaagtgagaaagtgaggaggttggttagttcgctagtcagtagaaagctgtcctattgtagtgcctaagcgccgcttttggctcaaacccgcagaattgccgaccgcccggaatttatcttttcgtcgaacggcaagctcaagaccacaagttcactgctctcaacctgcaccgcgatcatatctgcggttgcatctcttcttatctttgttacatgattcagaggagtctgtgtcttatctgaactggctcatattgtatctcattcactaacagagagatcgcgcctgcgcctgcacgaacgccgccaactaattgcgacacaacagtaccggaactctcctagtgtcgcattacaatcatgggtgtccccgcgttgttccgatggctgtccaacaaatatccgaagattgtctctccggttattgaggagcaggcccaagtggtcgatggagaagaaatcccgatcgacatcactcgtccgaaccccaatggcgaggagcaggataacctttatctggacatgaatggtattgttcatccatgtacccatcctgaggggaagcctcctccagcggacgagcaggagatgatgatggaaatctacaagtacaccgatcgggtagtcaacatggtgcgccccagaaagcttctcatgatcgctattggtatgtatatattctaatggagctttcaataccctccaaatcggagatgtccactaacctctatcctacgtacagacggtgtcgccccaagagcgaagatgaaccagcagcgtgcgcgtcgattccgctcggcgcaagaggctaaggagaatgaccagaagaaagaggaactccagaagatgctcgcccagcaacatgctacaaagaccggcgagcagttgatgcgggaggaggttgttcagaagacgtgggacagcaacgtgattacaccaggaacgccttttatggatatccttgctgcctcgttacggtattggattgcctacaagcttaacactgatccgggttgggaaaatgtatgtcttgatttattatcttggtaccaatgaacatactgacgttgacagctgaaaatcatcatttcagatgccacggtcccaggtgaaggagaacacaagatcatgaattttgtgcggtcgcagcgagcctcgcctaatcatgatcccaatactcgtcatgtcatctacggtctagtaagtttgtgatgatcttctaaatcaatcttctcagatcactaacttcaaacaggatgctgatctgattatgctcggtcttggtactcacgagccctacttccgagtactgcgtgaagatgtgtttgcccaagactcaaggcctcggggatgcaggctttgtggacagaacggccataaggctgaggagtgtctaggccgcccaaaggagaagagtggagaattcgacgagaagcagaacgctgcccctctgaagccattcatttggcttcatgtcgccgtgctaagagaatatcttgccgtggagcttcgtgttcctcagcaaccgttcccatttgacctggaacgtgcactggatgactgggtcttcatgtgtttcttcgttggaaatgattttcttcctcatctgccttctttggatattcgtgaaaacggaattgatacattgattgcgatctggcgtgacaatatccccgccatgggaagctaccttaccaaagatggaactgttgagttgaaaaacgctcaaattatcttgcaaggactagcaaaacaagaagatgccatcttcgcccgtcgtaggcaagcggatgaaagaaaacaggcgaacgagaagagacgcaaggagcaagacgcagctcgaaatgaagagcgtgctcaaaagcgaaggcggagttccccccagcatgacttgacagctggggatcgctctcacggtggtggcgagcccgcccctcccatggaacttatcacacccggccgaggccacttgaacaaggagactagagagctgacacacagcatggtcatcaaccgcggagctgtgtaccgtgctaacatggagaataagagcgccgctgccgtgttaaagagcaaactcatgaagggcaaccaggatgtagctggagacagcgaaactccagctacaaatggcgaggatgtaccaggtgaaaccccagggcagacttctcccggggttctcgggaaacgaaaggtggatgcaactgaacaggagcttaccgaggcaggaacacccggcagagactctcctctgcccgttcctgttgctcccgagaagcccaaacaagatgagccccaagaagacactgtcaagctgtgggagccaggatacgccgatcgatactatgagcaaaagttcggcgtggacccgaaagatttagaattccgccaccaggtcgctcgtgaatatgcgattggcctttgttgggttttgcaatactatttccaggggtgcccctcttgggtatgttgtcaacccccacttaattatacgattgagcttcgctaacttgattgcagacctggtattatccaaggcactatgcgccatttggtgggttttttctttggtggcttccctcagatttcccagaaatcagctaacacatattttacagctgctgatttcgttgatattggcgatatggacgtcaagtttgagaagggcacgatattcaaaccttttgaacaactcatgggtgttttgcctgcctcatctaaccacgcgctgccgaaagttttccatcctctcatggaaaatcctgatagcgagattatcgatttctacccggaggacttcccattggacttgaacggcaagaaatttgcctggcagggcgtgattcttctccctttcattgacgaaactcgccttctaaatgccatggcgaaggtatatccgctcctcactgaggatgaaaagagccgcaactctcatggtcaggatgttcttctgctatccgaccgaaaccctttgtaccaagaccttgtcgcgaacttctactctaagaagcctggcccggcacaatactccattaaagaggatgtgagtggcggcctggccggtattgtcgagcgcagcgacacctacatcccccacagctcgttagtttcgccattggaggcacatggaatgccaggagtcgatgatgatcgttctctcacgtgagtttaaccctcccatctctgcagtttgcttctttgactaactgatcaaagggttctgtatacgatcccggagtcttctcatatccacaagtccatgcttctccgcggggtaaagctaccgacgccaatgctggattcaaatgatatcagagccacccaaacacgatcccaaaactcgggccgatcattcggtggcgcacctttccagggcagaggacgcggcggccggatgaactactcaagtgaccgcccgaacccattcgctgcacatcttgacccgaagttcaactctgggccttcccaaggtggtcccggtggtgctcccatggtacctcctggatgggttccccctggccaagggtacggaggctacgccagaggaccgcctccccctccacgcggcggaatgccacaccagtaccctcctcagcaccctcctcaacacggttatcaacagcctggggactattatgcccagcaaaacaaccagtacaaccagggcggtcagtacaataacagtcatcaatcaggctatggccagcaggattatcgtggaggcagaggcggtaaccgtggagggcgcggccgtggtgggcagaaccgagatcactactccaacaaccaaggcggaggagggtataatcggtactaaaagtaaatgagggtccggctttctgactgtttcttgcttcttccgatactcctagttattgatcttttgatacgtttgggaattgggcatgtctagggaaccattggagttagagaaatgtaaaatgaattcaattgatgttccaacagacccttcttttgtccttctgcatgcaagagtcgcgccctgatgccccaagagtatatacaaaggctgctcgaatccccatgctacactatacctagacagtaaaaaaaagccattttctcaccacatggtccaaagtctactacttgttctatgttcatctaattggctgttttgtaattattctcactctttatttgggagtcctcctatcttctgcccgcaaccctaatacgatgcttgtctagttgtagaaggcggtgtaaatggaggggccaaggcacactggcagaaaaactaggcggggtgactcacccgtagacttgcaagcccttagagatccttagtcgcagtcaatcttctcttttaaaccactggattcaccacatcatggattttcctgcggaagaagaaatcgtgctcgctcgttggagggagatcgatgccttcaaacgccaagttgagctttcggctggaaagccacgctatggattcctagacggccctccgttcgctacgggaacccctcattatgggcatttgcttgcttcggtaagacgacagcgaacaatttgcgaatgatttgtgttttaatactttccactagacaatcaaggatgtgatcccccgttattggtctatgaagggatatcacgtggagcgtcgttttggctgggatacgcatggtgttcccattgagtaagttcaattcaattctagacaagacttgctcaagactgtgtagcccaggctggctgacacaaaacctagatatgagatcgacaaaaagttgggcatgtctggtctgcaagcggtccaagaaatcggaatcgagaaatataacgaggagtgtcgatcgattgttatgagatacgcgacagaatggcgccagaccatcgagcgattgggtcgctggattgacttcgataatgactacaaggtacgctcgagtacgtctgacattccctgcccttatgttaacactttttttcttgtcatttagaccatgaacccgtcattcatggaatccgtctggtgggttttcaaggagctcttcgacaagggcctcgtctaccgtggataccgtgttatgccttactccaccgccctcaacacgccgctcagcaacttcgaagcgcagcagaattataaggatgtgcaggatcctgccgttgttgtgacattccctctgctggatgacccagagacatgcctacttgcatggaccactaccccatggacgcttccatcgcataccggtctgtgtgccaacgccaatttcgagtatgtaaagatctacgatgaggctacgaagaagaactacatccttctggagactcttcttgggactatctacaaggacccgaagaaggccaagttcaagatcatcgaccgcatcaagggttcagacatgctcggatggaagtatcaacccctctttgattacttctatgaagaattcaaggaccatggcttccgagtgctgaatgacgactatgtcactgctgaggatggtgtgggtattgttcaccaggcccctgcctttggtgaggaggattaccaagttgccatgaaccacggcgtaatttccgagtctcgtcatcctcccaaccccgttgatccgcagggctgtttcacagctgaagtccgggactttgtgggccagcacgtcaaggctgctgacaagggcatcatcaagttactcaaggccaatggtcgtattcttgttgacagccagattactcacagttatcctttctgctggcggtccgatacccctctaatctaccgcgctgtgccatcctggtttgtgaaggttaagcctatcattcccgacatccttgatggcattgaaaaatcccactgggtcccctccaatgtcaaggagaagagatttgccagctggattcggaacgctcatgattggaacatttctcggaaccgtttctggggaacgccgttgccattgtgggttagtgaagatttctcagaagttgttgctattggtagtatcgagcaacttaaggaattgagtggctataagggcgagctcaccgatattcatcgagataaggtcgatcacatcacgattccttcatcgaaaggaaatggcgttttgagacgtgttccagaggtctttgattgctggtttgaatcaggaagtatgcccttcgcaagtgtccactacccctttgagggtgcagatgagttcgaggaccgtttcccagcagacttcattgccgaaggcctcgagtaagttgcccatgttttcccttctctgtccgttttcacgtgctaatattatatttttagtcaaacacgagggtggttctatgtactcagcgtgatcggagttcacttgcgtcaaagactaccatacaagaatgtagtggtgaatggcattgtactcgcagagaacggtctcaaaatgtccaaaaggtgcgtaaacacaatcttgacatgaccacgacccgaactctatctaatatgccgatctcacaggttgaaaaattaccccgacccgtcgctgatcatgaatttatacgggtgagttccgcagttcttcagtcccgagttgttcagcttttcatgttcttcgggattgtcctcataagaagtttcattaacattttttaaacagatcggacgctcttcgattgtacatgatcaacagccctgtcgttcgtgctgagcctcttagattcaaagaatctggcgtcaaggaaatcgtcagcaaagtgcttcttccattgtggaacagctacaagttcttcgagggtcaggtgaccctcctgaagaagacttcggacattgactttgtctttgatcctgcagcagagagcactaacacaaacgtcatggaccgttgggtccttgcaagctgtcaatcactacttctgttcattaatcaggagatggccgcttaccgtctgtataccgttgtaccacgactcctagagttgattgataacacgactaactggtacattcgcttcaaccgcaagagacttaagggtgaaaatggcgttgatgacacattgcacgccctgaacactctctttgaggttctttacactcttgtcaggggcctcgctcccttcactcccttcatcaccgacaacatctaccagcgccttcttccccacatccctgagtcgctccgtgccgaagacagccgctgtgtacacttccttcctttccccgaagtgcgtcaagagctctttgatgaggttgttgaacgcagagtttctcggatgcagactattattgaacttggtcgtgtctcgcgtgagcgtcgggctatcggtctcaagacccctttgaagtcacttgtcgtgattcataatgacccgcaatatctcgaagatgtcaagtccctcgagccttacattctcgaagagctcaacgttttggagcttgttctctcctctgacgaagccaaatacggtgtcgaatattcggtgtccgctgactggcctgtgcttgggaagaagctgaagaaggccgttcaaacagtcaagaaagctttaccttctcttactagtgatgacgtgaagggatacctcgagaataagaagatcttggttgatggcattgaactcgttgagggtgacctcgttgtgaagcgaggaatcaaggagactgacaattccaagggtatggaaaccaatacggatgctaacgtgttgaccattctcgatgtgaacttgtacccagagctggctcatcagggtctgggtcgtgagatcatcaaccgggttcaacgccttcgcaagaaggctggtcttgttcccaccgacgatgtgaaaatggaatacaccataatctcagacccggacaatatcggccttgatgaggctttcgaatctcaggctcacgtgttcgagaaggtcctgcgccgtcccgttgaccgcagtacatttggtggcgacgagcttcctactggagaggaagagggcactatctcacaggaagaacaagaggtgcagaatgctactttcttgttgcgccttcttaagctttagcatgccaaccaaaagaaaatgtgtagagataatatctactttttaactattttttgttgctttgaatgaaatcatatgcaccttcaataccaatcaatacctggcgaaatccaacctataataatttacaaatgcttttgcttgcgccgccgtaccaaaacagcctcaaatatttgagtgattccgatgcttccaacatataatccaagggaacctttctttagccctttctagatgccgcctgttgaatggttagcttgtcgaacagcgaagcactcgctcgtcacctaccaggtagcaatccttcagtcgcagaaactccttggcgcacatatctttatgtaccgagttgtaatcagtaacaacacacttgccgtacgccgcaatctatcaagctagttagatcggcaatgagatgaggtgagacagaaactacacacctctacagagcattgggctgaagccttggcaatcttctcgactgggcgagttcttcccggcatcttgcaatacgaggtgatgatgcagcaaatgcaaagtagcttaacattccaatgtgaaagcagtaagtaggacctccagagcttgggaatccaagattgttacataagaccacgtgaccgtcctgcatgtttctgtcgcgacaaccaaaacaacccgctcaaccgaccgttatctcgattgatggcgcatgggttgagtctattgttcccattcttttggaattgctgattgcagagtgtctctgttcgcgcatgtctttgattctccgcgctccccgctttcgcgatgatttatttggtcctgcagctctatgacccaaatgcgacaaccgcgccttaagatcgcgatttttcgatgcctccgatatcctctcagcgtcaagccgtgacagaagagatctcatctctttccgacgacggtagggcgcaatcaatcactcgttaatttaaacggagcctgacctctatagatgtcggctttctctaccaggttatcgctgctgccgagacaaaacccgaagcggatcgactcccattccgggcgcttttcgaagcatatgacgaagtcgttggcgaacatggcgtcaacgcagatccaggccatgcatgcctgcgcttcctgttcaagatgggaagcaaagatgtacgcggcgagactctcttcgacaaattcgagaatgcgctccaacagatgggaatcgtgattgaaatcggcgaggacggctctaccaacctgaatgagacatatgactacgatcaatatacagtggatgttacccacagccagaccgttgaccgtgaccattctccaattaccaatggagtgccaccgacacccaaacggcgcgcatcgtttaacaccacctacgacattggcgaggatcccacacagagaagtctcatcaatcgccctagctctcgatcgtcaatgtcgcggcttgaaattggcaagccccagttttctaaaccaaaactgtcacctacctccaggcataattctgaacctagcaagtcgccagatcggacacaattaatcagccagtttttggatgttggtcggcggttgcttagcagatttgacggaacagaaaacaagcacggagtcacggaagaaaccttcttgactaatggagtgattgcgaggtcggccgttgctcgtgatcgttcaaagagaatgaccgaggccccacgtccccgtcgttcaccctcgtacgattcttcgggcagttccgaatccaaagaggtgcaatcgatcatgtcgcagagcccagaacacgattcttttgacaaagaagaggtgccaccggagttcatttaccgcccgcaactttccgatctacttcgagatgcatcgaccttcaacatgtaccgacagcgatcgatctgccgtcgaattttgacacaatggctgaaaaaagcttttcaagctcgacagactcgccaaaccagggaaacactcgctgtcaattacgatcgaggccttcttctccgacaagcctttgatccatggcgagcagtaatccaagacaaacgccactcggctcggacagatcggttcttcaagcaccttgaagcgcgtgccagtcgcgcacgggacttatatctaatgaccaaggcgttcagccactgggctcaacttacgtcagaagaggtagctcggacttctgctgcccggagacatgtacttggcgtcaaatatttcaatgcctggcgcgaaatcactgccgtcaacgagttgaaggctcagcgttttgcgctacggaggccttttaatgcgtggcggaaaaagatccaagatttgaaagcagcaaaaactcaagctatcattgtacgcaacacaaagattcaaaaagcatcgttctgggactggtggtggtgcttctgcgaccggcgtgttcttgaggtttctgattatcgacttaagagacgatcacttctttcctggcttcggaatttgcgaactaatcgagagctcgatcatgaaatagatctacataacagacagtcatctttgaagtcgatattccagatttggtctcatcgctcgaaaagcattgcacttgcagatcaggaagtccaagcttctcggcgccaacatgacctcagagaaacctttgatgaatggaggattcagtctcggctggccccggctgcttctcgggtctctgggatggtgaacactcggattctacgaaatgccctttcacaatggattggcaaagccgaaatgttcagacaggcagaggaggtagatcgccgccgaatacaacacaactcgtgggtttcctggaatgacacgcttcgctgcttggcgcttcgtgctcgaattgacgagcgcgtcaaaagtgaggcgatgtacaaatgggtcttgatggaaagattcgagctgatgcgaaggatacgcgaacaacgcatcaagcgggaagtattctcccgatttgtgacaaacactcgggatacttacactcgtttactgtctcatgctgaagcttatgagactcatcagaccgaaaatttggttcgatctaaatttgccatttggcgtgatcaaatgcaacttcagcgtgagcgggagtatgtagcatctgagttttatgctccacggcttgcagctgagtctcttgcaatctggcgatccaaacataatcaagtggtgaagatggaaggttgggctcaagatgctcgattctatttcttgatgaagaagtccatgaagcaatggcatcaggctaaagtggactccggcaaaaaacggcggcaagaatcctatgctaaagtccggcggcgtattaaggtcaacctcgcgtctagagcgttggctgtctggtcatcaaaaactcgagtcatcatggagatggagcaaaaagctggtgatattgatcgcgaaaaattgcttgctgatgcgtccgcgatattcgtccaatggcacgacaaaacaaccatgaggcttcaggattgccagaatgccgaccgttcctatttccaccaactcgcgtttgagcagatgatgcgaatgtccgaagcattcatcattcggcgtgagatggaagaccaagcagagaatgtacaccgattgcatgtcctacgactggcagcagcttctcttcgcaagctcagccttcgtatcttccagattggcagttcggccgagacagccgaagccatgcgcgaaagaaatctgaggaagcactcgagaaacatgttccgcgattggctagacaaggctcaaatgaagctggaagctcgagattctgccggtccatccttcacgcccgcacgaatgtcaacctttggaaatggcgatggcgccggatcagcaattttcgacccctggtatcaagaccaagcagaaacacctttcaaaataagtgacttcacggcaacatctcagacaaccttccatgacccgatctctgcaagccccttggcaaccccaaattacacctctccctctaaacgagccgcccgggcgctagccctcgcccaaatgtccactacccccgccacacccttacgcacacctttcgcaagtcgactacttcgagctgggactacgactgcactatccacttcttccaaacggccgcggactggtcggcaaagctcggtgggaaatagcgtccggtttgtggatgaagaacctcccgagtctccaacagatggtcgcagatcagcgactcgacgatcttaacgatcttgttcggtatatgacctttctgcggtcacttcagcctcatgtacatcagcgattgttataattttttttttctctcataccctgtcgatacgtgcgatcatgtttcattcaatgcatcatccggcgcagcatatagcgggttcaagggtttctgggtctttggtatacagttttgcacttttgccatgattgaatgtgatactcaatttatgaaatgggttttccaaagaactttcgttcaatgagatataaagtatagcatctagtcggtcccgaggtcagataatagtaaatgcttatcggagagctctgtatgatgtgctcaaagctcttgaatacaatttctcgccgtaacaaatagcaattgctgaatccataatatcagtgatatttatagccatacatagctgtgttgttccagtcgacggtcatcggtcacaccgagtggagcgggagcgtaatcgactcaggtggtatgtctcttcgcctcgtcttgccccctgcgtgtatccagacaactccgccaaacacccataatctaccctccatttcacttgcgactctactcccaggcataataatctttgacctggcaatgttgtaacgtgttttcgagcgcaacgagcgtcaagtcccgaaccaaccatctctatgcgagcggtacttccggggagacccccagcgaagctgcaggcgttcagcacggcgctgtgggatggtcttcgtgttgttgtaagtactctcagatattgccagattcccgctccagctctgcggttcgtttaaagctccctgttgctgactcttacccccgcgcgttccccaataggcatacatctccggccacgcgctggttatcctcggcggtccgcaaacgctcctccaaacgatttacgtcgacgatacagaaatcctcgaggccgtagcttttgacgaaacatctggcaagattgctgtttgtggcggccctgatgtgttcgtgtaccagccatacggcatccagggcgaaacgctcaaggtgcgcccactactcggagcttggtcgaccagcaacacagctttataatgacaatcacaactgattttaacatatgcctttatttagtggtcgctcctttatacattccgcgcccccgatgacgacgaaccgatctatacactatcgtggggttcctcgaacgagctcctagtgggcaactcccgcctcgccctttggtttatgaatgacgaaccgcgccttgtatggaaaagggagcttgcaacacccgtgaaattcgcgcaattttctccggattcgtccttgattgttacagtagggcattatgaccgtttggtcaaggtatggagacgactcgccttcggcgcagacgaggttcggttcgaaaactcatacctgccccatccgaatgtcgtcaccgggatacactggcgattacctcggtaccctgagcaatctatggataatgttctgtatacattatgcgccgataacaagattcgggtatgggcagtgacggacgttcatgcgctttctgccctacagttctgggcagagattgacatggatgattcggtccaaccgaggcatgcgtcggatgaggatcaaggaccacaacggcggtatgggtttattttagatggccgcgacttctgcgctgcgacggagcgtgctgttcagaggaccacaggaaacaaggaaaatcatgcgctagaacatatcatcgaggttgcgagcaaggccccggagatctgtattgtcactgatggccggggccatatgtctgcttgggcttttgaggatatcggttctaaagcaaagaccaagttgagcgtcttcaatattctccatgtcgaaggcttggacttgggatttgtattcgatcaatcgccgcaagacgactacgctcagatttgtgcattccagagtacgccatcggacgacaagctcagtgttctggtccatcacttcgacggtcggatcgagtggtatgattctcgtgtggatgttctgtttgatcctgcaccccgcacgaaaagaatcacccagatggcctcttggtctggccatactgcccctgtgaaaaagattgttcggaatgcgattggagatacgctagtgtcacgtaccaatgaaaacaaagccactgtatggacacagcggcgtcgggaaggaagatcaatcttagcgtacaagagtgtcctcctctcggatgagcatattcatcggacatgtgtgctagagaacatgaatcttctcgtcaatctccaccacaatggggtctccctgtgggatttcagctcaaatcatgccaagaaattgacttctttgccattctcactgcccggcaagccactatgtgtgctgcaaatccccagcatccaagcgactccagatgtttcctatgtagcaacaatatgggcagacatgcacggaattgcgtgggaaatacgaggcccgagtcagggatcccacaaggggagctttataaatgagcttggctatcaagtgcgagaattctgcacctttgacatggggctggaggaggatgttgcatatatccttcccgtcgacccagcaggccccaaaacaaaaatatcgggcttcttcgattctttttctaccgacatcgctctctcctacacctacagtggagttgtgcgcacatggacagccacgatcgatccagtgaatgtgaaggtcgattggctacttcaatcaaccgttgatacaggcatcaccaacccatctatggctagtgggagctctattcgcaaggcagctctggttgacgaggaccggactcacctcacaatctgggacaccaacaatgctcagctggaatttgagcaacattttgctcctcatgacattatccaggatttggactggacgtcaacaccagacaaacagtccatcttagccgtgggattcccacataaagttgttctcttatctcagctacgctatgattatctagattcccgaccctcgtggacacaagttcgggagatctggatccgagatctcacacctcaccctataggagactcttgctggctgaataacggccatttagtcattggggctggcaatcaactgttcgtttatgacaaggatattgacgttggagaccgcctagtgtctgagcttcggatgccatctcgcggactatcatctgtcgatctcttcgacgttgtcagccggctgaatggcccgttgcctgtgtttcatccacagtacttggcacagtgcattttggctggaaagactagcttggtacattcgattctcttaaacctacatcgcaagctgaagttctatacggagggcgatgagctagatggtttcctagatatgccggtagaatgtttctacgagcaagatgtaagtgcgcgctttctcatatctctccctaatactaaggaaaatcagggttcccaacaaggggtctccaaggaaatgcgctcttcctacgtcgattccactgatgaggaattgccgtctgtcttagatgaaaacgctgcggccgcgctcaatgagagcttagcacgaatcgccttgccgcaactgtctagccacgaacagttccgcttggcagataccattgaatgcgttgccatggttgagaagcaccggcgctcaatggacgataatgcagctcggtatctcttattcttccgacaacatatgctgcggcggacccagggagttgccaataaagacgctgtctcatggcgagagattgtctgggcttaccatagcagcagccaagatattctcacagatcttgtctcccggcaattcaatggaaaattgacttggaaggctgcccgtgaaagcggtctcttcatgtggttatcggattccatagctgtggtgcgtgtctgtcacgtcatttcattggtcacgaactaaccaattggttagaaagcgcaactcgaaatcctcgcccgatgtgaatacaccaagacggaagagaaaaaccccatcgattgtactttatattacctagccctcggaaagaagaacgtccttcagggtctctggcgtattgcacattggaaccgcgaacaagcagcaactcaacgtttgttggcaaatgactttagggaaccgcgatggaggacatctgcgcttaagaatgcttatgcattgcttggaaagcgacgatttggtaagtcgagcatcatactctacaactgatcacttccggctaacacccaacagaatatgcagcatcgttcttccttctcgccgatcatctgcgtgacgctgcaaacgttatcataaaccagatgggtgatctccagcttgcgatcgcaatcactcgagcctccgaaggagacaatggaccggttcttcgggagatattagaagaaaaggtattgcctcaggccgcttccgagggcaaccgctggcaggcctcctgggctttctggatgcttggacgacgggatatggcagtgcgggcactgattgtgagtacttttcttctctagtcgccaaaccccaattaatcaaatctagtcgccggtcgagaccctcctattatcgacgaccccagccaccccgggaagcccggggcgagtaacccttcagtccaagtcatatctgtccaacgatcctgccttggtagtcttatatcaacaactccgcgaaaagacactccaaaccctcaaaggcgcctccaaagtgcgacccagggaagaatgggaattcgttattcgcaatgcccgactctacgaccgtatgggctgtgacttcctagctctcgatctggtacgccactgggagttcctaggcggactgcctagtcaggatgtactgaagcctaatacctccttggaaatgaacgagaacggagtcgattaccggaaaatgcttcatcggcggagcagcctcgtagttgctgatatgccggtgcgccgagcagatgtctcacaggaacccacacccggcgagaaaccgaagaaagaagaacagaaagcgaagccgaagccacctcctacgatgtttcatgagccggatgccaattcgttgctagacagctttgggttctaggttagggacttaattatgttgacactgtaatattttctggatatacgtacgtccagttgctatcgagtgagaaactggggcttgagcacatatataccggataatgtctggcaatttttgatttccctttccgttttagtgctcaccccttgccgctttttgctcactgagtaaaactactccggcccgctcactgagcatcacctgagcagacccatcccttcactgagcactcacgagtcaccgggcactcaatgagcagcctgatccgctcccatatagcttagtccacgctcgtctcacgggtaacaagatatctgtggcggacgatggtactccgtgtcccattcaccacgcaagtaactataagtctaaaccatcacactcacaaacggaacgtttatccaccctacatcattcagagtacacccttcaatgggttttccttcatcgtcaattctgaacccgtcttcatacggactgtactcctcccaatccagccgaataatgtgcacaacagccatactctcccttctatcggctaggaattactctagcatctcttgggttatctgaatgcagtacctacatcgttgcgactcttggattctgattcggtttggatcaagctcagacccttgttcctcctgttcggcagttgacgcccaccgcttaaagtgatcccgaatcaccgctgtgcttgcgctatcaaatttctatgggtcgtcaaacacggtcaaggccagattatcaagtaaatcagggcccgccatatcttccagtgactccgtagtatcgacgagcagacggcgcataaattctttccagtctgcgtcgctctggtatgtagagcggtagatagcaaaaccccatgcgcgatgaccatctttacgaagccaacgctctattttgtcagcaatgttgctatgtgagctgatgtatgggtggcgtggagattgttcctgcacttgggggaattgagcttgtgggcgcgtgtgtttttgcataggattcgccggtgaaattgacatcgatgagcagtatctttgtagggggaggttcagatgccaacttctttgcccaggatagagcgtgcgcgatgtaactggtgagataaaagcaatactcgtttttttcgatatatgaaggctgaaggtgtccaagcagttaaacaatagcatagtcacaatggttcacgtgattcgcgcccatgtaggcaatacaacttacttcacttccttcattctaacaattgttgaccaaggatcaaacctagcgagagagtcaccgtgctttcatctcaaattaactgtcttgggttattcttaatactacgtcttatcacagaagagtaccaatcggcctgacacgtcatgtttacatattgagattcgacctctccaagaccccggacatccgtacgtatattgtactgagtacaacatctgtgtgatgatctaccctcacacaatggtcaatacctagtcattgcaaggagactgctacacagtagcggtcaagatggagaatccagtttgaagatgcagagtggaaaatttcgcagatcccagctgacaattgtgttgatccccattgctctcactggctgcactacagcccgtagcgcgcttcacctactccagcagccccagatggctgcagatgggttccagttatcctgatggatttgcctatcccagtgcgatcggcggcgccaatctgcgctattacatcgccaatcgcgccgatccttcagctcccacaccttttgcgaacgatggagacttaggccgagcgtgagaaccctcttgcgccaatggcctagctgccgatcgggagacaatgcatacgttcatgcagactaaaatcgagagatgatgctcttaagacttcccccggcccgctggggtttgaagcttttcagctctctctgacttcagaccctttttttgtattctagcgatatatccctggtcgatttttgttctttttttcagcgacaatgcctaccaatatcccaggaccgcccggagttcccctcttgggtaatgttttcgacgtcaaccccaacgagacgtggaactcgctcaacaagttggctaagcaattcggtatgccagcaacccagccctaacgagtgatcactaattttttaggctccatttttaaaatcaatgccctcggacatgagatcgttttcatcggcagtgtcgctctgttggaagagatttgcgaccagacccgattccgcaagtgtgttacaggaccagtggtcgaaatccgatatgccgtgcacgacagtctgttcacagcatacgactacgagaagagctggggtatcgcccaccggattatgatgcctcatcttacgcaatctgcgaccgacaacctcttcggtgacatggcggaggtcatcccggacctgaccaagaagtggagtgcaggaaccaagacacgcactctgctcaccaaagacttggaccgcctccttcttgcatcctgcatgcaatgtttcttcaaccagcgggtacacgtgctcgaaggcgccgagccacccatgctcagcgcgatggacggcgccacactggaggcaatgaagcgacccacccgccccaagttactgaattggcttgtataccagcgccgattcgagaaagacacgaggacgatgcgcgatttcgctgcgcaggtaatcaaaacccggaaagagcagccagagactgcccgcaaggacatcctggatgcgatgatgaacggcgccgacccggagagcggcgagaagctctccgagtcgcaaattatcgatgagattatctcgatctttatcggtgccgctacagcacccaacctcgtatcctacgccctgtactacctgatggagaacccgagcgagatcaccaaagcgcaggaggagatcgaccgcgtggtcggcgacggcaatatcgacctagagcatctgcagagccttaattacgttgaagccatcctacgcgagtcgatccgtctttctgccaccgcgccgggcttcaacatcgagcccattccttctgatgataagagccctgtccttcttgccggtggcgagtaccaaattgcccacaaccagcccatgatcgcggtcttgagtcaggtcaaccgcgacccggctgtcttcgaggaccccgaggccttcaagcctgagcgtgttctcggcgagaagtgggatcagctccctgctgccgcgaagaagggcttcggtaacggcaagcgtgagtgcattggcaagctctgggcttggcggtggtcgttctttactctcgccagcattcttaaggagaatacgtttgagctggcgaatcccaagtataagcttgagtcgaacggtgcattcagtatcaagccgcttgagttatatggtcttgttagcccacggaagtaatcttgaaattgtttttttgttgggattgggtaatgaatttgtcgatatagttacatcaacgttatgatgaatagatcttagaatggaacaagcttaactctatttttattcttatttctatctttatttgtgaaacatgggtagttcctggagatgggctcattacgtggcgactacgtagtaggcgattgcgtatatacgccacgcggacaccccaaagtaagacaagtaaagagaggaagttctacaatagaaagaagcattgaaagaatgttttgtatttttataaccaaaaaaaggaccagcctaaaagtctctatattgacatagaagcagaaaccattccagctgggtgtagaccatcctccgagatagaatgatcaagagtctatcttcaaaatcatatcaaatcaaatctcaaagaaaacaaaatttatccgctgtaatcaatggtaacagccagacgaacaggaccagaggccaagttggcaccaataccaccgacatcggtctcagcagaggtgtaagcgttattgacagtagcagcgtcctgggtaaccgaagagcaaaccgagccaagggcatcacagatctgcataccagagatagacagaccagcattctgggcagcgataacggagacatcgaagccagaccagccactgttggtagtggaaccgaagtcgaactcgccccaggtagaagcgtagccaccggaggcatcagtagggatagtggatccggaggcggcgacccagccaccattcgagtcctcgtcgaaggcaatgtagacggtctcgccggcggcaagagtaaaggtgttacaggcgttgccgtaccagcctgtcatctggccatccgggccgtacttgttgaagatggcgacggtccagtcgtcggtgttggagcccgtgaactgcgccacgtacttgtagttgctggcggacgcggcgtcaacggtgatgatgttgctgccgtaggggttgcccacgttgccttcgtaggttgcgcctgagccggaggagctggtggagctgccgaagccggcggtggagtacgagccgctggagggcgtggaggtccagctgctgccgctggcggctgaggaggatgtggcctggcggcgctcaagggtggtgggtagggccagggtgctggtggtgagggctgcgagcagcaggagagacttggcgaattgcatcttggtgggtttgtgtgttgggagtgtgttgagtcacaaatgaaggtagataacccagtgaagatatgaaagagtgttgtgtgtagtggttggattcgaaagaccgtgttgtaaaggaatgaacggtagtaccaaaaggagtgtggttgcttgaaggaaagagaacagacacgagggtcaacggcaagggcaagtatatataccctcgaaatcgacagagtcttctccccacccgccacgctcgcctcgtaggtcgtaagtaaaagatgaaccgaaagttccgggtacctggctccatcgcagcgaaccactcgcggtgcgcacttgggcatacgtcaaaccgttgaaaggactcgtatacagagggttccacaaaggtcgaggccgtggatttgatatgcagttaccattggaggtgatctggggttggagtagatacataggtataatctgattgggcctatctgtgtacattctaagccaccaatgaatctagaattcgagatactccagggcattcttcattggctacccagtaaagagtgggcttggtcattgattatatccatgggcatctgatgtctagagccatgggtggacccggagcaagctctgaattaaaccagggaggggagacactttccagggtttcctaactaggtattctccgcatctcaattggtatacatccaggatgagggactacatgacaatattagtattgcagatacgagaagcgaatatgactgcagaatggagacaaggatgactcggcctagaaattcaaagtttgcaaatcgcattgtctgggtccaactccaaaagatgccctaatgtgggcccaacggggatcagatcgttttggtccggggctaaaggcaacggaactaccaggaactcagatccgggatgattagaactatggctgcgttatcaaggtgagctattgagacgcgtaataataatatggcattggcattggcatttaacattttgctggttcatgggagtatgtcggcctttgaagtcgattgatgggattttgtagaatttggctgatccgtggaaatgacgttgtggtccaggagacaaagtagcatgattggctgaatatatggacctccgaccaatcatagttgattgtattgtcttggcagggcatggcttgtatcgtggccaatcagaaccaacccctgttacaatccatggtttcccattctgttccttgaattctcttcatttgactttcttctggaaaagtcgcttggcccttctttatatgcaagccaccatcttccttctaccggctaagatttccctaggtggatcgtgtgattctttctgtgttccacttgctccacggccaagtcctaacccatgcgaattcggagtaataaagaactcggtgtttgaagagcaaaccttggaacagaccgcggggttcacgttgcaatctctcaaatgtggaaacaagccatggcatgttgggtccggcaatcgtttcggatatttgaacgaagattggtcttttttcggcttgaaacggtggaaaatgaaagtagacgatacacaccaccaagccctaatgcgatgatctctatgagacttggccaaaattgtgggtttctgtgacaaacgaaaagtctacacatgtaaatctggaagagtctagaaagaagttcagggtctttcatcttcaatgaaaactttgatttctgaggccacttttttttactttcaaaagggcagtatctattgcaattcgctggtgagatttgtgcctcaataacccacaagctaggaggcgttctatccactagaaccgatgacagaataatagtcgcaccgagtcagtaacagtcaatttcggcgctattatgtctgtttcatcaggccattattatacgacaatatcacgtgtagacactgcccttctcgactcgtggccaagggattacttccagggatttcctaatggcaaagaccaatcaaccagtatcagggctccaggccgtcccactataatacaggacctggccaattaaagtggcggatgaaactgcagctatgttgtagagatgtgtgatttgtataaatcttgaaacacaaagtacaagtcacacaagagatgcgatgctgtcgatttgattagctataaatccaaatccaagtacaatttctcaagtcaaagttcgggacttcagaactggaaggttgcaaggtattggtaaaccacagagagatagatgagcaaggaagacaagatcattactctttggttatcacatagaaaattcgtctgtacgttgtacgcctttccccgccttcgttactagtatatatcgtagtgctaaatcccgcatgtttactccgtactactattcccgttgctgtacttctatagctaaatattatttctctaaccaaaagccgcaaaaaaaaaaccctaaagacataatgtcttttaatcacttccaagaaaaacaaccaaaaacatctgaaatgttcagcagaaaggcggtgctcggcgctgacgtcgatatgcagatcatcgggccaactccgagaattgacacacgccataactttagctggaagtccggggattctgtacggagtataatgtccctgaaaaaaaggcatgaggggtctataccccacttccccagccccctcgcataaatgcctaatctccccttctttcgaggattgttctacgtacctagcactatcacaaagatggcttcccagttttcctcgctagctacactgctactcctaggatccttcctagtgccagtcagcgcgagcaagattcctgctcaagcgcagttgattgaccaaaaagccttcaatgtcctggacacgacccaacccccaaccgaattcaatgcgaagagtgtacgcgattcctcaattgcggtttccagtagccccttttactgaccgatgcgtagctatttgtgcctccagggtcgacaggagacagtctagcccagcggcctttccatatatacgacaaggaatttctgaagatcatcggagaagctccaactctaacccggatcgcacattccccaaaggaccctctattccatgaagcagttgtatggtaggtatccaacacggaaataagtccaggccaagggaaaatagcatctgactttactttctaggtccaaggaaacggacgaggtgttttttgtccaaaatgcaggtgctaagaacgccagcaccggtcttaaaaagtcggctatcattgagaggatttcgcttgcggacgctgctgctgtctcccagaagtcggatgccgtgggccttgtggatgtaaccaccattccgtcatcgccaacgattctcaatccaaatggtagatgaccagctcttttttggtagttaaagataactaacggtgctcaggggctaccaattaccggggacagatcatattcgccggcgagggtcaaggtgactatgagccccctgctttgtgggttatgaacccgagaagtccattcaacgctacaggttagtacaaaccacctctttgtattcctggattaacaaagcggtctgtagttatccttaacaactacttcggccgccaattcaactctctgaatgatgtcgccattcacccgaaaaacaaagatatctacttcacagacacaatctatggctatgtgcaggacttccgccctgcgcccggtctgcaggatcaagtgtaccggttcaatcccgagacaggtgctgtgaccgttgtcgcggatggatttgaccatcccaacggtaggagatcaagaatttgtacaagctcaaaaaggaaagcgcaactaacaatgtaacaggctttactttctctccagatggcaagtacgcatacgtcaccgatactggaattgatagcggctttttcggtctcaatttcacccgccctgcttctatgtatgtgctagttttcgcgatccactgattggatttgaagctgattatagactgtgtgttacagctaccgattcgatgtgaaagacgacggcacactcggcaatcgcaagacttttgcttttgtccactctggtgcacccgatggtaagttgggcagtcaagcaagctgaatttatgatgttgaggctaattcttgaaaaaggcatccattgcgattcatggggtaacgtgtatgctggctgtggtgacggtgtccatgtctggaatccatctggcaagctcatcggcaagatctatctcggatctggtacggcgaatttcaacttcgctggaaaagggagaatggttatctgcgccgagacagacctttactatgccacgttagccgcggctgggaattatgtcgacagtgagatgtgagagccagaggagtggctgtagctttctatatttagtcaaaaataattttgggtgaacaggaatatcataaacggcagtcattcggtggttcatagaacgaagcgttcgctaagaactgaaatgttgctatgaatggatttaccagacttggacatactagtaccaattatacacttgaactgatttctccgtagatcgaagatactactattcaaagtccatgctcaatagacatcatgtcttgataatataacgatggcctcgtggggccattaaaaagaaggattccatctggctgtcatgccatcttttgtagaaaaaagttcgagcattgggcaaggctcggaagaaaagtgccgttgctagacggagctccattcaagctaggtgtatacccaaacaaactataacaattagctctattggtgactcgactcaagcattcgaaatgggtctccaaatgtgagttcgccaatgatgtccgtggccatgaacaaccaccatttgaacacgtcagtaacgccatgagctatgatatccattgtaattttttccacagctatacggacacgattggctatcagtggctcaaggcgagctagcgaagagtcagagatgggtgacgctaaaagacgccggcgatgggtatggaagtgtctgtcagtggttgaaaatacggtgggttcattgcctatagccagcttgcgatagaaggtagttttagagaattggctcttcgttttgtgggtctcctttgctgtgtcggtgtcgcggatatcgatctgatctggactgattcggacagtcgggcctacttcaatgtcaggtatttacttctcataccgataaatgctggcagcacatacaatactttccatgaagttgatggatgtacatcggtaccgtcccatttaaccaattgtatgtatagttggcatcggtgcatttcgatatttcgggcccgggtatatgagacagagaatttgtgagtctacgatagatggtgctctaaatttcgtatttcagtaagacagtaacattgcatccccgtacgaggagaatttgttataccgaccagaagagcagcaccaataatgcatattagccagtggctaatcagaaaagaagtagataatatcccgagtagctccattatatgctttggggaagttgcttctgatatggaatcaagcaactattactactttcgaaatggtgtgctcgtgccgaattccgatattgcacacaacttccagctgtattattgacgtccttggtgatttgttatttctactattgttggcttgggtgtctaataggttggatgctcattagatcagatcattactacatggtggaatcacacaatatagggtttaactggtcttcacggctggggatggtcttgacaacgcctgtctcgtagcagcattattgaagttgtttgggttgattcatagcctcataggattcccctcatatatgcaaagattgacgattttgatatgaactgcccgggtggtctagtggtatgattcgcgcttagggttaacccaaagcattaatgcgcgaggtccccggttcgatcccgggctcgggcccagtcatcttttttttctttttctggtcctttacagcatctggagatgccacagattgtccatgatttgaagggttaaaaggataccctttttttaacttgcggcacacttaaaactttcactaactgctttaggctattatagattgcggggttagcgccaagtactttctaaaagagaaagtcttgtgcactactccgtacttggagacgtactaatggcggaagtcgttctctatcaggggaaagagagcctttgctgaatgatccttaaagttcaaggttcaattatgctattctacagtcgctggatttttgctttcgtttctagtcggaaaaaattcattgccatatttactcacatacgatttccagagatctatcataacgataatagcgctttagtctgcgagaactagttctatctcgttggaagagggaacaaagatttgaggtctgccaccattatcatcatctgtaaagtccgacctcgtgctttgaccatatcccctgaaagtcacgatagtatcagcatgggttccatctttagtgccccaatcccaccacccaatcgttgcgcccttgaacgcaaatcggaagatcgcaccagttccgagatgatctgggaactcccagagctcatcatccaaggtgaatgacccttcccagctctcactcggatggagacatacaaagtcttcactttgagcaacgtgaatcttggaaggttgatcattcacaaaaccgggacaataatcaccatatctgcagggaatccactgttcgctgccaccctgaacccgtcgatctaattgataatttaattcatcacggaagacatcgatgaagaaagtaagggggccggcagtggtgaaattgatattgttgacaccgtgatatgtcattttgtatcgaaattccatgcttatatcgccgttttgtcgcttcaattctgtggagccattctcggtttccagcgacacactaagtatgggcacgttgtgtctaatagaacccttgcttttgattgttgtcagcataaaattatatatattctagactgggaaagcaacgtactccgaaatttgggattgggatggcataatgatctgtggccgggaaaatgtaagtgttcagatcggagcacggaagatacgtccagagtcatgggacctcgtactcgtaaatggttagacgaatgccgtgatccttatctggcactatgtattattcttttcgcccattctgtagtcggatttctgagacaagcgtctaatcaccgactgcaaatattttcttgcccgttgacccttatgctttcatcactataggtcttgtgccacttggtgtctattcttgtttatcctactgatagcgtgaaaagtgtcgaacatgcatttttccaacagtgtcctttccttgcattctactcttgcccagtttatcacctcatctttttgctggccgcaatcatcgcccgggttttagattccgcttattatctcgcgagtgagactcacgttcctaggatcatatctggccctaggacccatagcatggttcttaggcacgctcttggtcgctccatggatcagacttgtagttcccagagattctacagctcccgggagtggagaatagagcttcggggaacaagtgggttcccaaagctacagtgggatcacccatcggataatatttaaatcaatagcataaccatacgttctacatctgttcctggccccctaagcacgaaccccggattacgagggccctccggaattaaaaaatgattcccagtggggcataaggaatctgtgataatgaacaataagctcaagctgcatgtgatacacgctgtctatatgagatggatgctggtgctagctgcggctgcgcgaagggtgtaccgtgtagcgaagtgtcgacgatgaagagctgaggacttctataacgtcgaagaagtagcagcgatgcaagagaccgggctcacgtaacctcctgaggtgctaagattacatgatagtgatactgatagagatgaatgctatggaggaaggtctgggctataagagagccaagtaattgcttgaacaggtagtcagctacctaggtctctctcctatgtatacacgacgtagggagtgtgacatatggttgttcttacttttcctcttcccttccaccctcttgcgctgtcttttctactttctttgttaagcctttttcttgccaatgcagcattttatccaagacataacaaaactcatggtctcgtcaattccccactttgaacccgtttgaacccgtttgaaaatgcagcactggcggtctctctccccctcgcccggagatggagcccggactgagccatttcttttatttggagatatccttactcccggatgatgaggcacttaccaatcggtactgcggagggctgcggcaagcgtggagtttggagacccgtgaaacaatacctagtcatttagcagtccagtatttcccgggtatggacggagtttgctaaacggggctgtcttttgagtgattacccacgagatgacagtgtcaccattggtgaggaaagttaccattttcgaattggcaagccgaaggaggaccgaagtcatgataatcggattgttgaacccggacctcaactctatcaacccatgatagagttaattcactacattcatcttcgtaatatgcctcaagcattagaatatcgcattcttaaagccttggaagcataatatactgccagtgatctagaaatatcgcgttattagcccgtacatccagagggcgtaaatttcgaaacgaccgtaccgttgtccgtgaattataacatgcttctaggattcctattttagctatttccttagctcgctcatgcatatccataatgttatatttaactatacgtatagaagttgaagaacaaaaaaagatgagtttttgtattgatttcggattttaggatatttgtgcgggatctatgtatacttattgttcttcaacctaaattagcgaaaaaaaacaagggtgtggttaatatgggcaagtacgttctatcggccgatctgcagaacttttgcggccctcacatattcttgccatctaatcaaaatgacatttcgcatgacgcttttagcatttccatattagattccttcaatttaaaaagaagaagaagaaaaaagaatgggcccgagcccgggatcgaaccggggacctcgcgcattaatgctttgggttaaccctaagcgcgaatcataccactagaccacccgggcagttcataccgagaattcccacatttgcctacaagagactcaatggaatttgctgacagcattctggaggcagacccaaaccacaaagtcaaacgctacccagcttacgatccaagccaagacaatcaaaagtattggcttccaagggttggccgtcccgtagagaagaatcttgttaagttggattgatcaatctagtgatgtcaatttacgagttagatactactagtggatctcttaacagcactgcatggggatctaggtatctgagataagttagcttaatcggagggcagatcttctcaaagagctaccatacactaggggcatacataaagcacacgatgaagctaaataccgttctgctagaaagatgcagagccgggctttcatgtagatataacgaaaggacgtatgtacaggtgttgaccagtccgagagcatgtatttacgcttgggtattggaatcggcctttatgattcatattaaaagctaggccaagttcaagaatacctacatatagtatgagccactcgcgctatacgacaaggaaacatacgtgagatagagcagcttcctcgtagaacgaaaggttatgcacgagaaggctgcttcaatatcctgcttttacaaaattagcagttatcctgtatgcgatgcactggtctaagatctaccacaggtcgggcccaaagaagtcgaagtcatatctctgagtccgatagagctcaggggagtatcgggcaccttgtaaattttgtaattagaatgccctcagggctggccaagaagcgtgactacagttcatcctgcatgtctttttgctcgagttgaactctttggcgggatcaaggtaatgcggtcgtccgtgtagaaagagccgggctgtgagataccccgacgaatggtcttggtcaatgaactcaaaatgtctccttcccactttccgtagtcacccaatttcccaagtgatgccttgatatctctccagatttgacgtcactagaatgatgtttccatagcatcccttgtgacctacaacagaggacccctcgcgagcgtttcttgcatgtggatgtggatatcgctggccgggtggataataccggcgtcaacaatgggttccagtggcaatacgagggaaaaaagcagaatgtatgaatgtattgttacgacaaacattccatcccttcttctccaacaatgcccgagatacgaggtacgtaccggcggcgttgcgagagttcttcgcgggtttcgccgccaacggtgaagcttcgatcagtactccgtacggggcattctcgtttcccacggagtcacgggtctcagtggagtccgtcttgatggcaagtgcaaaggtactgtgatccatcaacacacgagaagtatccgggtctcctctttccaagaacaccagcccccaaaatatagtcttcgaattcttccgctttagattaaatcaccactaggatgggagtaatcagccgtaagcttttattcaattggccaaagagatccgaacaaactctggggcatggcgatctgcggaatgagctcataaagacgttgtggggatcgagaatgacgtggggtatgcagcaaaagacaactcctccttttgctcacgagtcatgggatgaggagttcgagcgttcgagattccaaagttgctttccgttcatccatgtaacctcggatggagtttgttacatccaagcgaagggccggtagtcatagtgatagctccgcactccgcactgatcctcttttagtaccaaagtttggaatggatcgaatcgatgatgtctcacctggaaaaggagaacccctagtttttctatagtgccagtggggggcattgagttcactagcgattgcgaagatgtggaagcgcattgtacacgaagtgattaaaacttatattattatgttctatcatgagatctattatatcattaaccaccaaattatgtccaatcagattatgtccaatcaagacttttcttctctccaacaaatctttggcttctccaaatgttccaacttttttgaagagaaaaaaatgcaaaatgcaaaaagtccttacttggccggggccgggctaagcttcgcacgtagtcgcgctccgaagaagaagaagctgtagggaatgagaaccatagcaagaccaatgaaagcaagcagccaagaagcccactgcaagccgagacgatgatacatttgcgtagtaaacagcgggaaggctgcaccaccaccggaacgcaggaagaccttggctgccaaggcggatgcagcgtacttctggtaagagtcgatgatgtagttgttcacagagtagtagcacaaaaccatgccgtagccgaaggcaatgcccgatgaagcagggccgacccaaatgatatgcttgtaagaggtcgcgcccaagatgaacagggcgatcgggatgaaaggcgaaccgagcaaggctccgtggagtcggtcttctggtgtgggggctcgcgagtcgcagattctcttgaacttgtgctcgatgaggggagtggtgaccagggcgaaaccggcgccaatcagaatggggatcaacatgaggccgatctggccgtcgttatagccgtggagctcggtgaagataacggggtatgcgaagaagaaggcgtaaagcatggcgtaaatcagcacgatgtacatgcacattaggtcgagaactggctcggtcattatcatagtgatcggtcgaatcaagctcgtctgagcgatttccttgaatgtgagcttcgtcttttcttgctcggtgatgatgttggggtttccagtttctttgcggagtctggcagcgcggcgcttaagaatcacaggggcatatgtctccgggacaaggcccatcagaaccatcatgagaccggagaaggccaagttcacccagaagaagaggtcgaggcggccacttccaacgttgatccaacctgtgacgatggggccaagcacagggccacagtaaggcgcagcagcaaagtaagcaatggccatgccgcggtcctcaatgttccagatatcggcgatagtgccaccagcgagggaaagacccgaactagagaagacaccgcagaggaatcgacacacaagcaagccaccgatgtttggggacagagcgcagggaatgttgaagatggtatataaaagcatagagatgatgtatacaggttgtcggccgatgatctcggagaggggagaccagagtagaggaccaactgcgaatccgcagaccatgatggaacatgtcaggatagcgacttcgagagagacgtggtatttgtcttcgatcaagcccaatcctccggtgacgatggaggatccgaatgcaacacacaccaccagcatcgaagcgaccatagtgatgtaccagcgatagatgcgattccagttgtaggggtgttcggggtcattgatggtgaatgttacgaactcggcaggcccgccctttcctcccttttcaacgtcgacgtcggcgtcattgtcgtttggtggggcgccgccgtgttgcgtggaggtcgtcgaaacatgggttcggatctgctccagagttgtctggggaacaagaccggtattggtttccacggtatattcctcggggaacacagggtcctgatcatgtccaatggctgggtaattgtaatccaatggtggaggaacttctgaaatgccgcggtcggcgagagtctctctggtttcggtcctggatagacgggaattcaaggcctcgagacggggatcgagactgcgatccaagggctcggggttctccccctcttctggtattgttgagggcatcgtgagtgtgggagattaattagggtatagaaatagaaaagggctgtcgagcctatatatgagtggaaggactgttgagtctattggaacatgccaggtacttgaatgtaacacggcggatacttatactcccaaggtggctttgtgagagtgtcatacttttcaaagccgacgaatggccgaattagaccggacgatccccggaaaaagggcggaaaaaatacgagaaaaagacgaaaacatggcagaaaatggctcagaactgtggcaatgggggcggcaaaatctcggtccgagtgaccgccgacctaattgaaaaaacgacccacggatttcggagtctagcccaactttaaattgatgatatcactgccgatatgccgggcccgtgtatttggtgtattttgtgttttgggctgtgaaaatttcaatccgatcaggttttttagaggctcgagctctctccgccctggacgtgtctgaatgtgtgacgtgctcgacccaggccggacccatctcaggcgggggggcatggcagaattgggatataaagtccgtcttcgaattccggtctggggtttgttcatttctgttttcgaaccccataccatagtgaattcattatacggagtagtactgacttccatagcttcctgctcgtttaatccccgtcggggatgataccctatcttcgtacttattttccgtcagggcattcttcatttgggacctgatctcatattgacgctaagcagaagtccgccaattgtcgctcgcaaatctgacggcattctaattaaactttcacgtttcatttggatcttcttctgaaacaaaaagaaaaggagaaatatcaatttactgtcattcgcattcaaacgccggtatgctaacaactcattggataatctgaccgttaccacgagaggtactaaataatgcctaactcgatattcaaaacaatgcaaccttgcttgaattatatccagacaatattcctaatcctttatcgttgctcctttattcagctatcgatctactgctgcaaggatctcaatcaggatcgcccgctatgtatgtacataggtacactatcataactgcacaggtgggtcagtgaacagaccttaaagtgagacgaatctccacccattgggccgtaaaaacctactgctactaaccacaactgctattcagataatgataattgagctgtgaaggccgatataagccagtatctctcgtagacgaattcctggcactacaagatgactagagttagccgtcacctgtgtctggcttcaaattggcaaggatcatttgtaataataaaattggtgccctacggcttacgtgtgaacagaaatatgcattcgtacactaactaatccgtacacccctatatctctaacatggtatatactccgtgttgatgttttggtgggtcctgggcccaaaaaaaaaaggaatggcgccacccggaatcgaaccggggctaacacagatcattgttataccacaatgtgtcgtcataccactagaccatggcaccctattgattgattgttgacaggaaatactccataaaaggagcttcatcgactccacaatataagcacaactacatcgctagttaaaccactcagttgctattatagttgttagatatatgtgatgtaaatctaaatgggttccagtcatgactttaagtgccttacaaaatgctatgtcgcttatagatgttcgaaagagtaagttggttgcagatatatatctacggggttggagttatgtcacaactttcacaatttatggacaatcaccggtggatcatataaagtaactatttgcaattgaataagatcaagtccccatagaaaactcaaacagcacgcatgacactgcaattattccctcaacatgtatccagctgtaagatgaaacaaatccgaagaaacgacctacccgacccaaccttaatggtaccctcccaaaggtcatgagatgctgtgtatagtgataagctcagccacatgagccgagtagccgggtatgtattggtttctatctaaggtatgcaaccctaagtaatctttgttcgcttgttcgtaaacccagaatctggacgagatcgcttccgctccgttgcctccatttcagctctcataatcctctcctgttcagtcattttcttaggagctgcgaatatagagcccttcttcccagccaaagggttcttcttagccatagcaaacacgttcttcggcttttgtgcacccatggacatcgaaatcttgaccggtgcggcaggcgcagacgaagcaggagcgtcggtgcttcctgtcggtgcatctgtttcttccagcgataccgtcgtcgttgtcgtcgtaggaggcgaggctggcttcgtatctgtcttcttcgagccgagtccaagattcaaggtcatcttttctccttccttcctctgcaataatcttgcctcgggttcagggtctgtcgtagtgccgctagccatcgccgcttgttgggctcgtttgatctgttcctgaattaaacgttgctctcgttcttcgtctcccttctcctggcgttctttctttaaaatggcctcccggcggcgaagtgtgtctggactgttatcaatccatgctatgaccaatcccttatcggtttcctcaacccgacactttccctcacgtcccaaataggccgcaaactgtgataagcttttccattctgcctcggaggttagtattagtccttgcctctcctctccatcgggacatacctgtgctgttcatgtgaatgtgctacaagaaagtcagctagaacgaacaggacaacagtgtaatacaaaagacatacctgtttatcagccacaatctgattatagaaatgattgacgttgataggtttagttccatgcgtagttctgagggtgtcgaggaaagtgcgctcaaattcgcgactaaactctctgatgtgcttgcgcgggtcttctccaatgagcatcatctgtcggactaatataaagttagtcggtggccaggacagaaaagagaatagagaccgtaccatgcgcttcagtcatagtgtgacatttgaagccgttctcatctcgacattgtttctcacatgcctggcaaaaccatcgaaggcgacccaatcctttgcttttgatcttgttgccgatggcttttgtactgcctggttccgcacgacccattttgtaggtcggtaaatgaaattaacgtaagcgttcggaggaggcgacgagacaaaaatgcttcaaaggaccaatagatcggaaagatggtgtatgttgagaagcgtttgaagaaagtagtgcgagaagctttgaggtggcgcagatcaacgcgataagccgatcgattacataacatatcacatgacatagccaaaaaggcctggtcccgagcttccaaaattggttagttgattccttaattcgatgtcgatatggatgtatacggagtatcagtggatgaaacgaagctgaatacctaggttcattgaaatattccgacaaaatgaagcaaaactcccccaaatcctacgcctgcatcccgatatcgcttttctacctaggatcatagcgtacgtaaagaaagatgtattccggagacaaaccagcaaacctcgccaagacgaaggtatgtagcaaaaaaacaaccaaagaaatgtgccatgaaccaagatggatattaaatcaccgagtctgcaagtattacaagatgtactcgtggattgcagacggcccgctctcgttgtactcaacacggctcatgtaacccttgctgagaccctgatcaatgacaaagaaaaccttggcggccatctgagcgccgaggaaaatggcctcttctattccatggccaccctgggatgtgccggacgctcctgggttacccccagcactgccaccgctggcgccgggagcgttgctgttgccctggtctttgaagtccgggaaatactcaggaagctttagagtcttgactgaggttggggtttgggagtggccggttgagcggtagtgtgacaacatgccggggtccatggagggcgtgccgggcataccggggttgttgtgagttgcagccacaaggagagggtttactccagctgccgaggggtggtacatctggccaggagcgggtgtgttggcaccggttggaagaggggtggtgaagttcgaaggaatttcagacgtgaagatggtgccggatggagaaagtatgaacttttgcgtgatgacagccagcaaggcctgtgtgaaacctgttttaatgttagcgaaataaccgaactctagatagcaatgataaaacatacccttgactttgcttccacatccaacgataattaaagagtcccaaagctcgcttcgctttgtagcatctggaacggcaagaatagtgtggtgaatctgagtcgcaatgtcctcgaggataccgctggtcaagcggtttccaaccttcgagcgcggcgaagtcaaaagaaaacgctcaacactgacttcaatatctcgagtacgacgagtgtactgccgagcaccgtgggctgcagccttctctccttccaccggaacaaattcctcgaactggaaggacgccttctcttttttcgagttaggcaggcgggttcccttggggtcagctgcgcctttcttggtagttgtcttctccttctcgacattggcaaggtattcagtggggttgccgctgacaatcgcagcgacatcgagaacaccctcatcatcgtcaccattatccccctctattcctgtctgagtgccgtctcctggaccgcgcggagccgactcatctccttctgatccgcccgtcgaggcaacagcagcagggttggcgccctggcgagcagtagcagaggaaccaggcagtggggttcctgggggaagaatctcagtaatattgcttcgcttgagttgctcgcacatctctctggtaaatcccttcggacccagcagctcaacaagacgatcggtcatagcgtctccaccacacccctccagtgcgattcctctgccgtgttcgttgaccgcgaagtcggtcacagcagtgacatcaaccttgccctttccaacatcgacaacagtggcggtaggtgtaccatagccgtagcaagccgcaagagcagagtccataagactaaacgcgggtgccttaaacttctcgaagacgaattgagtgatcgcttcgcgatcgcgtgcggaccagacgggctgaccaacaagcataatcggagtgtggaaaggtgggctcaaggtattgtggatgtgagtgagcagggcgaagaaacagggccagtcgacgatgcgcccgttctcgaagggatagattgccccttcgtcggatgccaggtcctcctcgtagaagacttcttcaatagtcttggttgactcgtcattatcctgagtattttcgtcggtcttgacagtggtcccatcagcagcggattcagcgtccttcatctccacgtccggctttgtgtccgtgccattgttgaccttgacctcttgacgtctctcgagaacacggtaaggctcatattctcccttcttctcagcagggaacatgcgcgttgggaaccgaaatcgcgcgggcgtgaatgtttcaggcaggccgagctgcgccaaggtcatttgcgaacccggcgcaattagctagacgaatggttaaaattgaacaagaaaatatgaagaactaagcttaccaagatatgctcatccttgaagggcggcatcgttatcagtggcagtgacgagcgttgcgacgagtgatgactgcgagctccgctcgatttgcgttggttactctttcttcccattgtggtttagcgtgatttggacgaatcggagtcggtggttggtcggggaataatgtttccgaagttggagagttgaggtctacttctgcgaggtgacaacaacaaaccgcgatttacgcagccagaacgtattaactctggaatattttgtcaataactataggtgatttgttactttattgaatttaggattgtaaaatgaataaaaaatatgaaaatgatcgaacatgacatagctatactatttacatagacaggatattacgcagtacaatacaatatacacagaatttgtctataagctcagtcagaataagatctatagatatcctccaaacatcatgatggctagcaaactcggttttgattgaatatacgttgtatgccgttcggtcttctatagagaggtagaccatgcctgtcaaacattcaaatcatatgcaattaactaatgcattgtgcgctttcacgccattaatagtatatccgcccacagcctatccccctaaagcagagaaagaaaaaaaaatctgaaaccatatgaggaaaaaaaactccagacccacatatccggtggaacgccatcatcctttgcactctatgaccagcacgagtctaaggtgattctattctgggacagcatggtatttgtcagtcgctgatcggaatagctcctgctgttgccttagaagctcctcttctgtcagaccactttgctccatcttgctctgcttcttctctcgtgactataattcagatgagaggtcagcctgcgctcgaagctatcacaatcccaagaaaaatatgaacataccttcagctgctgcttatgctcttcggcaacagcgagtacatcggcaatataatcactgaaaccgagatcccgtaatgccttctccacatgttcacaagcgatggtcttcttggcctccttctcgctgatatcgtttgcttcggaggagatcagtgtgataaattcgacacagcattccatgagcaagtcgcgcgcatccttggagaaggtttggccggagctaggtggtaaaatctcggtgataatcttttggaccgtcgctattagataagttagcaaatgctaacaaacacgtatgacaagtgtataggcggtgaagcggtaagaacctcaaaaagagctgtacacattcacaaggttattgtaccgtacctttaggcagagataggtcatcgtttgctattcacgtacaggtcagcaggttgcgcgtaggcggccaagatctagagatcacttacagttgaattctcggtcagacatggcgaatcagatgatatagtgatagacaacaaaagaacaaatgtcagatcgagggagaggcgcaaaagggatgctttaatttctttgatcttttgcgtggggctcaaagtttcaaggcccatcgcaggcgcgcgacggagttaagtacaatttcttgccggcagaatactaccgctttggaccacataaattgcgctgaattttcttttccgttgacatcttcttcatcagtcttcaatctcctccaactaccttggaaagagtccttcaaatgagatcgactccttccgaggccacacactaatggtaagctcttgttcaaatcccttttcccaatttctatcatgatgaactttgcttgtcgcccctatcatacattctatggtgaccttacctgtcctagccaaacggactatctgatctctatcaattctgcacatttgcatctcacttcatttgtttgaaacggttgctaactttattgaagaatttgcaggaattccatctcttgttattgtagcttggaactcgtttctgcttggatgacatccacagaacacatttggaggacggggatatttacatctgtatctaaaggtacgcgcataatatttgctatattttcagttccaattacatgatgtatacccttacattccatgctaaacatgaaggtgcactgcgcctaatgcttataaaatgtattgcttttcatctttcgactgacttgtaaaccattgctgcctcacatttacattcattgttctatggcgatcgttactgacttgctataaagattacagatatgaaccagaattttatactagctatcaatgatattattattcctggaaaacctcgagctccttgtcgttccatctgccaattattagtatttctcgcgtaatatgtgtaggacagcacatacgaatagaaacgaccgctgatttccttgggcgcatcgagtaccagcttggccatgacatggccgggctgctcgggtttgaggagcttgccgttcttgtggactccagtgaacttggagtgcatttcagcgtccaaggctgtgccatggtcctcccgcagggcacgctgcatctcggtgtcgaccataccaggtctgatagacacggaggtgacatcgggttcttcggcacccaggctcatggcaaagttgttcatggcggctttggtggcagcatatagagcccaaccacggtaagcgttgactgcagcgccggaagacgtgaagataatttttcctttggactcacggagagccggtagagccgctttggcctagttcccgttagtagtgcatggtagatttgatgtaggtcccgtacaaaggcaactaagctgataaagttgacatcaaagccttccttccactgctgcggatcagcgtcggcgattttgccgacctggcctagcaggccgtgattaaggaccattccatcgagctgaccgaaggtcttgatagctttatcgacggcctgttgggcaagagaaaagtcggacagatcgccattcaggattgccacctggttgccgtattgctccttgagcttttggaggggttcaacgctgcgggctaccaccaccacattgtgggattgaggtgcggtgagcagatacttggccacagcaagaccgatacctggttgatgtcagtctatcattatgcacaaagtttgaggggtgtacctcttgaagctcctgtgacaatgatggttttggctgccattttggtaaatgctctagtcactaggtgttagtggtaggagatcaacacagtgacaaatgtaaagagtagatgctagattcgaaatgatagcggcaatgagaatgcatgacaacaggttttggtattgctttgtatgccaagagacttgcataaacttgctcaagttgtctcggatatatatctgaacagctctgcaaagctaagaactcaagcattggggaatgctggttgggcagctggtgtaacctactcgatgtttattctgcagatgtcttgagccgaatatcaatactggtaaggaatgattatatgaagatggacacattgacagagcaccgagagaggtctagtgcggggcttattaatctcgtggggtcgatctcgggacggtttccctatatggaaggccgacggacgtcatgctgtatgtacatctttcgttttatagagtagtgtatataaaatggaacctatagtaaggcgtattcttgagcttcagtcaaagtagccgtgtattttgcaattcaaaatgagagattggaggtattcttcttacgtaggtagactgtgatcgtggcgcagcaggcaaatagcttcaagaaataactttaatttaaagattacgcttaaagtttaagatgatacatcataaagccgcacatcccgcagcaaaaaaaaaggtagaaagaggcgttgctgtcacagtggaagcataggggaagagaacttgaccgtatagtgtagctacggcagccacccaagaggggccggtcacgtggtagccaatttcagagaaccggtccgagagatccacccgtcgataggaaacactttcacgatcgcccaaaggagtcaacttttgcgatcagctccttctctactccacagtatttttaagtttggatccaccggtagcgtgtaccatcatctaaaagccatggaattcctcccggctatcatcccagcacttgtacatattcccgggccggtgcaaaagaaaccgggaagcaagatcatagattgccgagaaatataagctcgaacactcccatttgcatgcattaattgcaacccatgctttatttcgacaatccgcgttgataagcgtttctaattttgcacctacaacagccagcatgtcgaccgtcatccttggaggaggtatcattggagcctcaattgcttactacctatctgccaaccagccagaaggcgatattcacatcgttgagcaatccccagagcttttcaccgcagcctcgggatatgccgcaggtttcttagctagagattggttcgagccatctcttgcccctcttggtgctatgtctttcgacttgcaccatgagctcgccgcagcggaaggcggagacaaaaaatggggatttatgaaaggaacagcgttcaacttggataccgtcgctcaacgcaagcgagggggtccccgcggtgatgattggttgcgaacgggcactagtagagcagagactgcggctggctccgaggataccactccggttgagtttccggaatggttgacgatgcagaaagagggaatactggagaaaatcagccagggtgaaaccgtggctcaagcgtgagtatcaaaccgaagcgtttcatgaattatttgctaattgtgttcagagatccattgcggctgagccaattcctcattgacggtgctatctcccgaggcgctaagcttcataacccagcccaggccaccgaagtggtcaaggatgcgagcggcacgattacaggcgtcaaaatcgtgtctttggattccaagaaggaatcaataattccgtgtacgaaccttgttctgagcatggggccgtggacaccacaggtccttagagagctgttcccctcttctcaggtatcattcgatataacgcctttggctggctattcattggtccttcgatcccctcggtatacaatggagcacgagagaaatgtttaccgtggaagcagccatgctgtatttacaacacaccctccgtcgtgcgggtttagcccagagatcttcctcagggaaggcggggagatttatatcgccggtcttaacaaccccgccatgaagcttccaccccgtgccggtgatactacccagctttttgatcccaccgagattcgaaagctcaaagatgttgcaattcgtttaatgggggatcttcccaagggtacaaaggaggctaccgacgagaaggccaacacagatgacttggagattatccgtgaagggctgtgcttccgcccggtgggaaatactggtgttcctacaattggaagaattggagattactctttgggaagtgtgaaagcaaaccccaagggaggcgtcttcatagccgctggccacggagcgtggggaatctctttgagcctgggaactggaaaggttgtttctgagatgatcaaaaagcaaaagctctctgtgaatgtgagcggcttggcggttcaggacaaagttcctagttccaagctgtgagcatttgatctgcaataggaaagagctccagatgtccgcctaaatgtgcttttccaaaggtcactgacaaagcaacattgtagctgcgtacttctttaatctcatcgatttcatcctctgagtgcgcacatattgactttcgaaggctcccttgtcggcgttaacaaagagcgatcatcttcgacttagaatttcaatacctatttatcaaactaaatgtcgaagagctcaaaatattcgtttgatactaatacgatcagattggtagactcgacttggttatacactttgagtactatttccctctattttccctctcctttctttccctctcctttctttgacctatgatactggcttgtaatgagatcaaatcaaatatctatctataactcatctccatctcaagtcagtctcgccccggttctaaacctagcgccagcatcgggagtaaaaataggtagaaagtcacaggaaaaggcagactaagtttgggactgcaggtacgctaactcactatgtaactaaccagttatagctcttcctaagtaagctgctttgcctaggtgacagtttcttttccaatatctctccaaagactttttttggatgagttttttttttaaagaatactatcaaatgtttcagtgttatagccagaataatacaataaggatcagccgtgaaatatagaagatatttgggtaaaggtgtgttcagatgtatatctaggaaatttactaggcgtcggagtatagataatccgacggaccgagcagctctccgccactcgagctctccagaatcttcaagcatccgatatctcccagctttcaaagcaccgtcgctttgtgcctgtttcttctgcaaccctcccatccaatttcaccttccatcaattcttcatcagccaatatcagagactgcccgtaatcaaccatggccaactaccttgcatccatcttcggtaccgagcaggacaaggtcaattgttcgttctactacaaaatcggcgcgtgccgacacggcgaccgctgctctcgcaagcatgttaagccttcgtactcgcaaaccattctcatgccgaacatgtaccagaacccggcttacgaccccaagaacaagatgaaccccagccaaatgcagaaccatttcgacgccttctacgaggacgtatggtgtgagttgtgcaagtacggcgagctggaagagttggtcatctgcgacaacaacaacgaccgtaagtagtgctctcttcaaaatttgtgtctgaatctactgacatctgttttcgcgacaatagacctcattggtaacgtctacggccgattcaaatacgaagaagatgcgcaggcagcctgtgacgcgataaactcccgttggtacgcagcgcgacctatctactgcgagttatcacccgttaccgatttccgagaagcctgttgtcggctcaatagcggcgaagggtgtgtacgagggggcttctgcaatttcattcaccggaaagatccgacacccgacctcgaccgcgagctgcgactgagcaccaagaagtggctcaaggagcgcggcagagatcctcgcagcgccagccgcagtcctagccccgagcccacccggcgcagatactagtggtgtgccacgacgaattttctcattgttgtttccctacattcgatcctttggcgttcggcgatatcagtcggtggttcaattccactttcctttgcgcagcggcgcatccagggcatggggtctcggtttgtctttacatttgctggttggcatttgcgtttcatgatatcaaacttgcgcgatcaataaaacccacagctaaacttcatgtataaatctcgcttagtaattccttatatgtaccacctggtaggtagttgaagccgaaaccagtacgttgaccagcacctactgagtgatatcggtcaaggaaactgattcaaagctctctctatagcactttgaatccacaagtcgttgtcagaaaattgcaattgcttcattactaattaccaatatttcaacaacagcacgcgcaatttgactaggagaggtcgacggtgcagtgagctgtgcagtgtcgcggccgtagtcatagatgtcgtggaagtcgcttgatgtttggctttggctttgacaccgagattgaagcgtcgtatgaaaaggagtgcatgctcatagtcgtaatacatcgggtcactcgaagtactgtttcatcttcggctttttctatcacacacataggcagtgcctggtgcgatgcgttttaaaagtctaagtagatggttacataaattatgaatccgcctcataatctatcttccgcccggatggtctagtggtatgattctccgtttgggtttccatctcaaattcggagaggccgcgtgttcgaatcgcgcttcgggccctcatctttttttgtttttgctccaaagttctttacttcaatgtatgaaccagcgcacgcaagtaaagtcaagtagagacaaacaaatcgtctaatgctatcaaaaaccatctcatacgattcacaattagggtggttttctctcctcgtcactttttgtatgaatatgcctcaggaaacaaatttactaagcttccttatcgcatgttcttatctttctttcatctacagccacgcgagcgcgtctgatcgcgtcaaagccagtacgccgttggcacaaagagccttgaactgactgatattgtgaactctgacaccctagagcatgatttatggtcgagaatatggctggatataatgacagcaatcgtgcctttctccaagcgttcatggcacgttcgtctatgacctttgaagatgcgcaacccatcctagctgcgatattaacagtatctggtacctaactcctgcttgatcatggtgctatgaataacggtagttgctgacgttgaaatgatcgaacagaagggcgaacagtggatcccgatgagattgagaaagaccaattctccgactttatagcggcggctaataccgccgtgtcacccttcgacctcgaaatcagaagcttactgccacaagtaatcgaaccagcccaacaagatgccccagccacacccccgaagcgagtctatgcgcttgtaaatactacgagtgatcctttgacacagctcgcgaccacctattccccggacgagatcgcgtttctcaagcgcttgctggacttcatgtttgcgaaaaataatacacgactgtgtgaaggcatggtagcttcacagatgcaagctgtttcactccataaggctccgtctggcgaacggcaatccacgagcaacgactcggcgcagtcgcaaaccgcagcggtacagtcactgcgtatgacccaagcagaaaccctggtcattcacttgattgaagagggctggctgcagaagagcgcgaagggatatcttagcctcacgccacgagcactgatggagttgcggggctggttggtcttaacgtataatgacgagagtttcgatggccgagctgtggagaggatcaaattttgtgctgcttgcaaagacattatcaccgtagtaagtatacttaccgctctttggtatgaaaaagatctgactgagatactccagggtcaacgctgtgaagaccgtgactgcaagggtcgactccatgaccattgcatgcgcaacttcttccggatgcaacaagcagagaaatgtcccttatgcaaagcggactggcctggcgataacttcgtgggcgaacgagcgatcacgaacccgaagcaacgcaacaccgttccacaacagaggaggtcttcgtctgctgcgtctagtgccgttggcgaaggtttggatgatgaggaggacgaagaataagagaattgaacctctgctggctggtgaaaaataccggttatgggtcttgcctctgcttgaccaagcgtcagttacgaaatgggttcaccgtggacacgcccatgtgaatagcaacgaatgaatgaacgacatggaagattatcgagcgaggattgctgttagttagtttgaggtgacatccaaagcgatgttctatgtcatgtctcgactgcattcttgggatttttgataaggctcaacctttctattttgttttaagatgtaactagatattggggattatgtacatgggaaggatgggccttgtaagatacaagcgggtacatacatgatcttggatgacctatgaaatgaagtcgaatacttgaagctattgaaatgcatcttactggctggcatatcttagacatcacgcgataggtgtctgaatatgggcatgcaaatatggtacagtggaaaaaccggcgtggtcgtggtaagttaggggaaaatacataaatgtggtacgacaaggtaaggtacggtaaaataaatctcaagccatcgattttctcttggcagaagcccaaggccttggattcccagtcctgtctcactccgtactccgtgctctgaacattcatcctttatctcttcaagggtttcaacctggtctttcaacaattgatgtgctgtataatccgctaccttccggcgttttgccgaacactttactaatatggaacccccaacttccccacaaacccaccaaaaccctcgagtcgcgctagacttcccctgcagtcgatgacgaggtcaccccatctcaagccgatttcggtcttcacagccaatagcccgattttatgtacacaatatcatcatattggtcgttgcttcccgcattttccgattctcccgtggcaagccgtcccacatacaagccaccactgatgactcgtacgccatttccccagaaccttgatgccaatcctcactagaaggagtagtataaccgacttggaactgagaacatccactctctgaccctggaacgggccagtaggcttttgactttacttccccacatttcaccatgcgttcatagctggagcgattttaaattgctactacatcggtatagggacgtgcctggatcatctcatgtcatgctgatttaggaaagcgccattaatctccatctttccctaaaaactcctcttgcttcctccatcatcctcacttatgaatagtgctgaccgcttcttcctattcaactcgatatcgacttattcgagcatctgacctggttgacaaagcggtgaaactgcaatatgcggtttaaagtgagtttgtactcctatgtccttgctgatcatctaacactctgcttagtccttcacatgcgcggcattgcccctatttctgaatcttgttagcggctctcccgacagtcgtatcaaaaggtgctttagggaacacacaagctctagctcggccaacttcagcaacaatgtttaccagaccggcttcgatggtgtgatctgggacgaagacaactggcttctgagctcaaccaacttggaacagggtcgttttcaatctcgaggatccgtggcgaacggatatctgggtattaatgttgccagtgctggtcctttctttgagattgatagtcccgatgacaccaacggctggccacttttctctagacgccagaccttcgcaacggtcagtgggttctttgactcacagcctaccaccaacggcagcaacttcccctggttgtcccagtatggagacgatagtgtgatcagtggtgttccccactgggccggaatcatcttggatctcggcaatgatacatatttggatgcaaaagtcgacaataagagcatttccaatttccgaaccacatacgacttcaaagcaggcatcttggtctggtcctacaaatggacgcctcggggcaacaggggatcgtaccagattacctatcgtcttctcgcccacaagctgtatgtcaatcaggctgtggtcgaaatggagattatcccgaccaaggaatcgaatgcgaccattgtcaatgtcattgatggagcttctgcagtgcgcagcgacttcgtagagaccggggaagacaatggtgcaatcttctcagcagtacggccgaatgggattgctaatgtcacagcttatatctacgcgaacctcactgggtcgcccaatgtggatctctcttcgcgcaagattgtgcccagcaagccatatgtccattccaacaaatcgtccattgcgcaatccgtagatgtgaagttcaagcctgggcaattagttcgtgtcatcaagtatgtcggaggtgcttctacggatgcctttgttgatccgaaacaaacagccaagaaggctgcctccgctgctatgagcaatggctacgcccggtctcttcgaactcatctcatggaatgggaaaacgttatgccccaagattcggttgaccactacgcatttcccaatggcacattgcctgcagatagccacatcattgatttggcagtaatctccgtggctaacacttactacttgctgcagaatactgctggcaagaatgcagtcaaggaagccgcgggagcaccgataaatgtggacagtatttcagttggtggcttgacctcggactcctatggaggccaagtcttctgggatgcggatgtatggatgcagcctggtcttgttgtttctcacccagaagcgtccgagcggttcaccaatttccgtgtggcaaagtatgcccaagcacgggagaatatccagactagcttttctggctcccagaaccagacaaatttcagtccgtcagctgcaatcttcccttggactagtggccgatttggcaactgcacggctactggcgcctgctgggactacgaatatcatctgaacggagacattggaatctccttgattaaccaatgggttgcaagtggtaatacaaagttattcaaagaggaacatttcccaatctacgattcggcggctacgctctatgcggacttgctggttcgaaacgggtcttattggacattgaccaacatgactgaccctgtaagtctggcgcccatctctttacagcacccaaaactaatataaagtaggatgagtatgccaaccacgttgatgcgggtggtttcacaatgccactcattgccgagaccctccgacatgccaacgccttccgtcagcaattcggacttgaagaaaatgctacctgggatcaaatggctgacaatgtcttggtgcttcgtgaaaacgaggtgactctcgaattcactaccatgaatggaagcgctgtggttaaacaagctgacgtggttatggtcacctatcccctgggctatactgccaattacaccagccaaaattcgctgaatgatctggactatgtaagtattttgattcccggaaagagagccaaactaacaagatctagtacgcagcgaaacaatctgctgatggtcctgccatgacctgggctatcttttctgtcgtcgcaaacggaatgtcgctatctggctgctcatcatacgcatatgcgcagtactcatacaagccttatacccgtgcgccattcttccaaatgtcggagcagatggtggataacgctaccatcaatggaggcacgcacccggcgtatccattcctgactggccacggtggttccaatcaggtcgctatctttggttatcttggattgcggctggtaccagatgacattcttcacgtggatccaaatttgcccccccagattccatacctgaagtatcgtaccttctactggcgcggctggcccttctcggcgtggtcaaattacacacacacgaccatcagccattccacagaggctcccccactggagactgccgatcagcgattcgccaacaaaacaatcacgattcactctggccaagaagtcgataccaccatttaccatcttcctctcaagggctctgttgtcattcctaaccgacagactggatcggagaacaccgtaaaaggtaatctcgtgcagtgccaggctgtttcctcttcggatgcattcgaacctggccaattccctatttccgcggtagacggtgcagcctcgacaaaatggcagccctcactggcagctgagctaagctccgtgacagtctccttcgaagatgaggctggcgctatggtattcggtttctacttcgattgggcgcagacacccccggttaatgccactattatcttccacaataagaccctggaagatcctgcggcggcgctttccactcaaagctcggactacacaattgtgcaccgcctgataaacatcgttcaatcgaacccatacgatcctgataccacaaacctcgatagggttgccatccctaccggaaacacaaccaatgtgactttatcatctcccataccagcagcacgctatgcgtctcttcttattgtgggaaaccaagcccttgactctgttgatgtggaggctaagaatgggactggtgcgactgttgccgagtgggctattctcgggcaagcaaacgcaagcactgcctcagcctccaaatctgcaaataagaagatgaaagtgcgtgtagcaggaaccttggtagatacggatgcctttatgcgtcggcgtcagtttttattctaaatttagatgattgacttgccttagagttaccactctcttgtaaatacaatacagtcttcatttgatttaattctctaccaatacacttatcgagtggaaactcacgaatgaagtgtgctccaagtaatgttcgagttgtaaattgtgacaattgaacagaatcgcacctatttaaattgatatatccatacatacagtcataaccaacatcccctactcatcaagcgcgaaccgatccaagaacttgaaggtccgaagtccctcctttatatctttgacaaaggcactcccagcattgctagcagtgtacacaccatcgcggtccgtagaaatgagtgcagagcgtagcgcagccgagcccttaccgagcgcaccaaccgtcttcccgaaccggaaagcatcgagcagaatatccaaaggccgaccagcgggatacaaagacgacgcaccagaagccttattcggcacgctagtaatcgacttggaggcaaacaggccctccgcaccatccgcgacaacaacagcatcgaactgcactgcgtccgacgcagaatacgtctgattaacaccatccgcaaacctctccgcaacaaccacgacatcaacgcccacagcagaaagcgcagactgcagcttcgcgccctgcgcaatagacgccggcttatcgacagacgcaaggagtccaactttcagcccatctagtttggcgagtttctgtccgaaggcgccgatatgcgcggtcgtgttgtcgtggtaaaaggttggatctggcttcggcgcatcaatgccaatggcctttgcgacgcgcgtcgcgaggtcgttgctgatgcggtttagctggatgatgacgttgttgcgcacgacgctgctcttgacgttggatgtctcgaatcggatcgcgtctacaatgaattgcttctcggcgggtacgagcgagttccagaataggcgtggctgggaccagacgtcttcaaaggtagagctgacggtgcgttggagcttgccgcttgatgtgcggtcgggtgcggtgaagaagccgttgcctacggtttgattggcttgttttggggagccgttgttttctgtgttgggggagtaggcgtttgggtttagggggatgaacatttggcctggggtttgttagaaagagggattggaggatggggtgggtttggtggtgggacgtacctgctccgtcgcggttgttgttgtggattggtacacggggccggttgatgggcagctgctcgaagttggggccgccgtgacggttgagttgggtgtctaggtaggagaagatacggccttggaggagggggtcctcggtgaaatcgacgccgcggacgatatggcccggttggaactaagaaattagtattgtaagtggtgatggtgggttgggacgtaccatgacttgctcagtttcagcaaagtagttcagggggtttcggttcagttgcatcttgcctagcttggtgacaggaacgagttcctctgggacaatcttggtaggatccaaaagatcaaacccaaaccgaagctggtcgtcttcctccatgatttgaacaccaagctagcaaaaaattagcaagaattgcgatggatatggggttatcacctacctcccactcggggaaacgtccagcttcgatagcttcgaaaagatcctgacgcataaagtccgcatttttaccagcggtctgctgtgcttcctcccacacgaaactagccttgccctgtagtcccttccagtggaacttgacaagcttagtctttccatcgtcagtcactagacggaaggtgtgcacaccgaaaccatcaacatgacggaaagaccgaggaataccgtggccagccattgcccaaagaagggtgtgaagtgcactaggctgctgactgaagaagtcccaagccgagtcgtgcgcggtagcagcctgagggatctcgctatcgccacggggcttgacggcgtgaatgagatcggggaacaagatagcatcctggatgaagaaaacggggatgttatttccaacaatatctagatccaaatcagttgtgtactttcgtcaaaaaaagatctgccgtaccgaagttcccttcatcagtatagaagcgagtcgcaaagccgtggacatctcgcgcagtatcggcgcttccgcgactgccagcaacagtagagaagcgcgtgaacatcggggtttgtttgcctttggcagaaaggaaagacgcggcagtcaggttggaccagtcgccgtacgaggtgaatgttccgtgggcgccggcgcctcgagcatgaacggcgcgttccggtaccttgaaaaacagatatgagcgttggaacttcgattaaaaacgtggaacacatacccgttcatggtcgaagcgttggatcttctggcggaaaatgaaatcctcaagcagggtggctccacgctctcctgcgctgagactgttttggtcctcgatcgggccgccaacatcggaggtcagaaagacatcttggtccttgaggtagaattgggagagaaattcctcggtggaagaagcatctccatcacctcgtctctcgagggggccagcttcgccagtcatataaggacaggcagcattggcaatgccaacaagacccgtaacgagggcaagcacacgcattgcggcaggtaagtaatataactgttaatagaaggccagtctcaatagagttgtcaacaattcaaacttcaggtgaaaggtgaaagactcggggctcgctttatactccgggttgaatgtgaaccccaaacaaaacagcccagtgcgacttttgcaatgggccaatgggaagctccatgaaaatgctatgacgcagatttcaggtactattattgatcagacctgggctggccaattctccaaccaggaacccgttgattattccagcgcaacggccggccgagactaacagtgtgatgagatcgaatcacctgttggatatagtggggcacggctagaggtgttgaccgtctccacgagccaaggagaagatgagagacactatgcatgcattgctccgaatggtagctccaatggaaatgctggggtgttgatccatatgcgggccataggaatcagcatcaggttatcatggcgccactagaaggaaatggcaaaatggcaaaagatttaagctgactattgaaaatctcggcgactctttgaatcggaatagccggataagcgtcaagtcaaccgttgcatacaacatagcgaagggggtgaaggggtgaagtcttggcggttgattaagcgtaggggcacgttggtcgaggccgcgatgcttggtaattggcgagtgacatctgggcatccttgcaagaccacttagcgtccgtttaaatttgaaaacgagacggattatgtaggggatctgcaccctagcgtcaggaaattatgtctcatgttggatttatctcccaattgcaacgctgatatctaggtaaacaaacactcgcattgcaacatcgccattgcagtctagcactcgaaattgggacctgaaaatctacagggattaagctgcagtgctcattaccaagaccagctcctgcagctgatccctgtcaacgcacatctcttaccacttttagaactcatccgcaacgcagttgggatcgtctgtgatgacccgtttgtgttagtgatgttgcatcggcctccgcggaggcacaacatggggaatagttaattttagatcttcggggtcttgttctgcatcaaatgacatgcccatgtgctgttcgtggctgcttattgttgggttcgcgtggtgtgagatgcttggcggggaaagaaataatctagccagccttggaaggtgatgacactggtccttgacgatcttggcaactgtgaacttggcataattagttgtcgctaaagggctatttttaatgtgatatgtgtgtgatagagctttcggccggggagtacggggtatttttgtgagaggggttgagatgtctttttttggattgagaactgtctttggatctagtagaataatacggatatgctatagttagatagaactgttgaatggacagaatcaggtatagtctagacacaaaagaagacaaagatttatgatcgaatgactacggagtattctttctataattcaaacagccacatctccaccacgaagtacggagtatcccgtctatcataccaccaagtactccgtatagtagtatactcagccgatgacacaacaaatctatcctcgagccatcgcaaccacctcaccgggactagcggggtcactgcgatccacaaacccatgtttcgcatacagcggaacaccagccttactagcatcgatgtacgccgccacgccttcccgatccgcaatctcacagccccatagaaccagcatagcgccagccccgcgacgacggtagtcgggatgcgtaccgagcatatcaaggtctatgttttactagcgtcaacaaacagtcccccagcagaacaaaacaagcggctaagtagctagctctcgagtgatccaactcacagtaatgcttccgatcacccatcacccgcctgcgctcgctctccagccccccaaagaaagtatcgcaaacctgcccaggcatgtccccgtgccaaggcgggaaccgatccccgcgctcgtcgggcatggccaggtcccatttcgcatatgcgactatccgcgccttcccttgcgtgtcagtggtgctggggtcgatgatcttgatgtatttttggaacggctttgtgagcatgtcggtgcggttggcttcagtgaaccattcgcgtgtccctggtgtgtcggggaatagacggcgcatgcccgggtcgttgaacgcggtgaaccataggtctgtaatggccgggaggtcttcgactgtcgcgggttctaggactagagggtttggggtagacattttgggctttttgtttgcgagttggttgttgggacttgtcgcggggtagttttaggtcgactgcaggctagcggtcaatgctacgttgatttggaatagtcgggctagtattagttgattattatttgaagtctgagtcagacatatattaaagagatacataactagactagaacggaatccttgctcattggtctcttttatgtatatgcaggtctaatttttgagtacatcaaataaaagaggcagcccagggtcacccaggtatagttggttccaatggcataaaagagttcccttctcatgtagaaagacgaggtagttggaaagactctccgtgctctctcatatatcgcagtttcgtttcgaatcagtttggcgggagtcgtgcgaccgaccaacacgacttagatttgaaagatgagacgttgagcagataggattattcaaggaccattcgggcatgtttcataaactgatatccacttcccaaatggcgtttttcgtcaacgggtggcttgggattggatttccgggagacgaaggggatatagtaaattttgatttcagtttcatgggtttatctacaattcatatttacattgaatgaataataacaagaagattgagggatagacgtaagaatcgcccagcctaggttcaaacagaccgtctatagagggtgcccttaagccaaagtctcaagtgagcggtaaaagatatgcgccgacactatatcgaatgttagcaattgcatctccacgagttataaagtgcacatacgaaatagcggcaaagcaggcacacaagatagcaccctccaaataattagtctttcccttgagcacgatgaaatcgaccagaataacagccccgatcagagtgaccatctcgaacttgtcaaaatgcaaggtcatgggcttgtcgagagcccagccaataagcaccatagccggcgaaaccaagagaccgatttgaatggccgatcccagagcaacactgatggcaaggtccatttggtttttcgaggccacaacaacggcagtaacattttcggcaacatttccggcgataggaataatgatcaaaccgacgaatgattcaccgaggacgccctgttcgttgagcgttgagaagcttgaggagaagtattcggcgcatatggcgatgagaacggttgatagggcgaggagggtgacggatatcgttcggttggacttgatcacgtagcggtcgcagcgacatggtccatagtctcggataggtgccgtttgtctggggaggcaccttccttcagatgccgtgtgtcggtggagggtcgttcttccttcagatggttcgttgtggaacagtggcatggccgctgccgtttgtgcgtcgactgagcatgaccgtgatcgcacctcttgcatctctagctggcggatatgtctgcttgttgcgctttcgaccgtggtgggacgcgattcgaggtcgtctgtatatagaggatcgattggatgcggcatttggagccgcgtggagtggaacaagtgagcgtgtgatttgaactggaagaaaaggtataagaaatatgtgaggagaagaatgatggacacccccctgctgaaggataatgacatatgatcagcagaagtgacgctcttgacgctgccatagaaagcggtctatgttcaggattagtattggaagcaatggggatacttggaacatcgccttacgggaatcataaggcaagagatggtgagattgagaagtcccacaaatgactgggtgagatcggtgttatacgtcacatcacttgtcgaaatacagcctgctataattgcagatccgaggacgagcagaaggttcacaaggatggagccgaggagtgatgattgaactactttaatgttgtttttcaacaaagcagtgctataaagattagttttggctccgccgacttatcatatgaaacttacacactatatgatagtcagtatatatagtttgaaaataagtgagttccacattgagactcacaaaataataagctccgctagattccctatcgtgatgttgaggagagcgccagcggtctcacccaaatccttggatatcctctcggtggcttctgtgagtgtgatcgacagcggcacaatcgcaaggaggttccatatgaatatcacaagcgccgggcttttggtattagagagaatgattgccgatgcggcgaaggcaccggagaagacgatcctcggcctgagaatctgttttgtctgttgtttgaatatggagaaggaattgcagggtctgccatgatggggccacccagacaacgtgtcgtcattggggatctgtgttttgtgtcgaagaaagctttttactttatggaagatgtcgtcggagattgaattcgtggaggcctcggctggtccttgataacgataagaagtccatgtcagcttggacgacgccggcaattggaggatagtgcggactcactgttcatttcatattgacaaggataggagccactagaccggggctcagattcgaaggaagtattcagggcgtgctcgtcacttgagctttcagcgaaggtattgatgtcatgaaggttcttatcgttggaaccattcactgtggtcatcatggaagagccccgaaaaagaaaggattaaaaccgatatataaatgccaaaatggagggcggaatggccatctgaatgtgaaaacgagagattgaaaatgagcgtgatatatggattggtccgggaattgattatcggcgagatgatcgcggcacaacccctttttccttgtggcacactggtcttaaccacttgcgagttagcgtcgcttggctccaatataattcgttctgattcctccttatgcagcgcacagtggattgtgtggggggttgtataccgcctacctaccgcctaccatagatgcactgcagaatacagaagaatggtctatctcatgattattggccagtgaaaggtatgtatagaaaggttgataaatcataccgtccgaatccgtcccctttccaatattgaccacgaattgatagcagacatgctattttaagaccggcagtaccggcagaatccacgagtgtcagacccctgcgagaagccccactggacgatgatcagtcacgtgagagggggctaaaggtgccaggccaaccaaaaaggggaagacaaagctgttatggcgacagaaagtgtgtggagaaaataaggctgggagatacttggtgatcggtttctagtgggcgtgggatgcaataatccccgcagagattgacgtagcgcgctgataaccttccaaggtgggaatagtagacccatacgaggcgttacgattacgagtggaaaaggggctcagccttccaaggctgtccttgggtcatgtatgatgatatataactggtcatcggaaacaccgtcaagagggatggtccgtttggttccgcatatcttcttaacatgggtgcttttcccaaagccagcagcagcagaagagataataattttgccaagcaattaaaacactgcccgcgtgttggtgggcttggcatttaatcaggattttgttgatatatcatttttcacttagggctcaagggacctactaactatggtatagtgtatctactgaccatgagaatgcaattggtacatatccatggatgtgttctaatcaatctttgatttgttcctgaacacccaccaaggctctcctttcaacgattaatctttagcgagggaaacatcgatgtatcatgttgcaagtttagctatctaggctaagcacggtaacaaagcgaacactcaattcattccagcgaagatataagcgtggaagatatcagcactgtacgcggtcatgggatgtatcgaaacatcaaaatcaggttggaataacctccgatctgtatcctgcaattcgaatgcgcgttcgcaatggcagcaagcacactcaacagtacaatgtccccatcctttcatccgatcggaatctgggggatgttcgcagcatttgcattgtctgccactgcaaccgcctcgtttagcacaatcctgacgtagccatttacttcgcagatgccacccggctttttctcgtgaagatagatatgcatctttggcgaatcctagtctgcctctagactcggcgacatacatatttctttcaaggcgccaatattctttgtctagacggaccagttcgtcggtcaacttgtgtagctgcttttagtcgtctgccattgatttaacctgaactttttggatatcttccttcaagaatgactcgcgctgggtagttgcgcatagctgcatttccgtttcgatggcagattgcgcccaaccatacgctttatcgacgtgccaatccaagttgtgacaccgtcgacgaatcttttgagaaagtctccacacaccagatctccctattggcttttccacatggaaagccaacttctgagcttgctcgggggacatcatcgtgccttatcatattttcgagaagaccaataagacctacagcagttattaggtaggtcagacatttacatcatgcatcatcatagacctcgataccaagcccatcttaggaactaatctggggagaaccctgaatttaagtgcagtcgggaaacctacctgatctagtccgtattgtcttttatatcgccgtaactggtgattcggtcaattttgcgcctggcccatgctccatcggattcgcatccacttaacatgtggacttttaagtggatccccgttttatatttgagaatcgaatgctctcgctcgtggggtagattccgaccggtaaacccagtcgctcaacgcggtcccactaggtctcgctatgtttggaggggcgattcatttgccaatgtagaaagccttagcggagcaaagttatagtcaactggtgggtgaagaaagaagaaagagaaatatagaattggatttacttcaagtaggcacgccagtgcaccatatccgattgtctactagggtatagctatagacacaagaatgtagtcggtcacttaggctcgtctttgtagtcttttagtatttttatcttttcagacgtctctttagatatcttctctattttgattccctggactcactgttcgcaggcgcttatctatatatggctcttttcgttgcctttgtctaatacttgggagatacttacgctgcgagttcccgcatctgtccaaccaaatcgaccacagtctccttaaagggccgatatttcacccccaactcccgagctgcagtctccgcatcaaacccataagaggcactcgacttctcacccgtcttgtaattcgtagtcacaacatccttcgcccactcgaattcatcgcgaatgatatccgcagcatattcatacgagaacgtctccggcgaagcagccacaaaccgcttcccaccagcttcgggcgtaagcaaagcctgaacatgcacctcagcgagatcgcgaacatcaatccaaccgggccgcgtttcaggaagtggatctgcaccagcggccacactccagagcaccgtatttgattcgttgagctgctgcaccgtcgacatggggtgcacgactggaccgaaaaccatgggaggacagagcgtcaccaggtcgaactttgttttttggtacttgacaaactcccacgctgcgagctcggcgaacttcttcgacccacggtatgcagttacagcagtggatttcggatcgatggcctcctcgtaagtcagagggttccagttcacggctgtatatgtgaatcctggtgcgggagtgctgctcgggttgatcactgcggagacggaggatgtcaagacaaggcgctggacttttgatcctggcttggcggaggccgaaagaatcgacttgactccgttgatagcgggtagaatcaattcctgctcgttgttgatggtgtcgtagaataagggctgtggaacttattagttctttgtattgatcagaagcagaattattgcgagttgcctacgcttgctacatggatgaccgcgtcgatatcatccattacagaatcgaagaccccaatctgggtgaagtcttccacgatgacgaaatcaagctttgaagcgtactgcggacgtgcagctttcatctgatcccccttttgcttggatcttgtcgagcctcggactgagaatccgcgagccagtagattgtcgacaacatgggcgccgatgaaccctgtggcgccagtgacgaggatgtatctgtgatcatgagcactgatcagtagttaggaacagaccgacatacgagggcttttgagaagacattcttataggatgtaggtgtagttaaaggtaaaatgaatatcgacaagtgtcttctgggaatgactttactgtagtatgcagtgcaccccgcgtggggggaaataagatctcaagatcgatatccacagcaattccacattgctgttagtgtgggggggaaccagataaggctggaaatatagtctaggctgaacagagaagcgtattttgttgttctaattcgttggttatatggtctagatatgcgtctataggggacatcatctatatctactacatcatcacttccaactctccttcagcacctcctccgttgtacggacgataatatcataggcattacggacatacctctgttcagccagagcgtttccactaatcacccgtataacacagacgccatcaacgactgtagaggtgatgaagattttaccttccgcgttgaccaactcggagactttcttagtcagattgtcagcaacttcatctttggccacgcgaccaggcgattcactagccccgctaggattcttgacacggaagacagtcaagccaaaggctggcttcgtgacaatctcaaatatatcagaccgaccgcgcacccagccagcaaaaaggtcaccaaacccgatggtcttgcggatgtgcgatttcatgccgttgagaccatagctccgaatcacgaaccaaatcttcaatgcgcggaatctgcgaccgagagaaatagaccagttccggtagtcaattacggttcccatatccgagtacgggttgcgcagatatgctggtgtgacatccaaggcgttcgtcagatccaagcgattccggacaaagaggacgctaggaatgttagaccaaaagtgcaaatttacccacagacacttggaggaaaagcttacctagcatcaaagttgactagcagccacttgtgcatgttcgtgttgaagctgtcaacaccctccgcaaagtccttcgcaatgtacttccactcatccgcaacgagcgccgcaccggcataggcggcatcaatatgcacccagatacgctgccacgccggcttttcttgtagaactgccttgatctctgcaaagtggtccacactgcaggtatttgttgtgccaagggtcatagtgaggtggtacgggacaagtccgtccttatcacacttctcaagaagctcacggagacgaggtccagtcatttccatgttatcctccagccgcgtggacacgctgcggaagcgagtgcccgcaatcaaagcacccttagcagcgctgctgtgggtttgatcactggcaatggcgaccagcttagcttggacatcgaatttacggtcctcgtactctggtgtaccctccttcaggccctctgcaagaacaagctctcgcacacgtctctcccgtgcggcaacaataatagtcgcaatagcatcactcgcactgttttggatcacaccgccgccgtgggtctccgatgtacttctaaaacactggggtagtgccagagctttcgcgacccaatccatgacaattgtctccatctccgtacatgctggcgagcacaaccagttgaacgcaggggcggtgaatgtggcggagtacatctcacccagaatgctggggtatgtcacgcaggcggggaagtatgccatgaaattgggagactgccaatgggtcaatccgggtttgatctttgtatcaacatctttctggatttgtgcccagtcctctggctcgtccggagggttctctgggatcagagggcgaagatatcccggctcgacggcgggcaggactcggagctcaggtacgctgtcgaagtatttgatgactgcacaaaagctcggttagatttaacattatcgagcccgaaggttgcacaaagttaggacggctcgtactatcatcaatggcagagtgtgctgcggccttgaactgatcatgatccatgctgcacgtcaactagatctgcgacgcggggtatctagagctcaaaatgcggcaattggcggcacagtagaacacagtacggggagaaagatatagaatgaaagtacaagtagaatatgtgatattgaggccacagcgaatgttccaaggcaaatgtgggaaaagcaaacatggaagaaaaggcgcggggaggcctggaattaattccgtcggaagtttccttccgtgttccgagagctcggaatattccgcctttccaaggagtatatatgccataattccaaatccactctcatagctcaatcttcctcttccttgggatcataaatgtcgcccgcaggtgtcttctctagcctctttccatcctcagtcacaatctccttgctagggataaccaccacaaaaacccgagcaacatccttgcctcgatttacccattcgtggtttgcaccgcggcagacaatgacatcgtgttgatttaggatcttctcttcgcctccgtctgtgataaatccgacggtacctgacagcaccacagcgtaatccaagctcagtgtccgatggaaccagcctgcgtctgccgggggtagatcaaggacgcgacaggaaggacccttggtgtcagccagtgggacgagggttttatgcggatcagagagctcgcgcatattgtccactggaaagccgcgcgaccggtgaatttggataaccccgaacccagagtcaggccccggggttgagaatgccggagcagatgtgggatcgtatggcgtcagaatttcgtcggaagcgaaatacgcctttccctgagcatcgtggcctgcgataacgcgacggattggggcgtccatggtaagagaaagaaatctctgggatgagtaatgggcaagagggattgggatagtctttgaagcgggaggcgaatatggcagttgaaaaagaaagcaagtgtcagtgggcttatataccttatggactgagtaaatagctgattaattaatggaatacagatgaacattaccaagcacttccacgatgttgatcgtcattcataggtttggtatgcgctgcttcgatttataatcatgggattgataagatgggggccgaaaatatatgaggctgcaaggagagagcctccagttcgactgctggcagaagaatctgaatctaggtagcgtgcatagtgtttcgagaaaaaaaaattcgctgttgtttacctgggctcatgtggagtttccctgatcgccttcctcgtcgtccggtttgtcaaatccttcatcatatacctcctctttcagctccttcccttggacactcaacttctccattggtagatacacaaataacatgcgacaccatttggtatcactccggtttcggaatgaatgtgcagtacccctttggatgctcacatcgccacgatgcaaatgtcgactcgaacctgagtccagtatgagatcaacatccccctcaattatcacaccatagtcgacgctcactgtccgatgcatcggcgttgcctttcccggacggaggtcaatcagacggaaaacagttccgttatcgactgtgactccaggaggttgatgtaagaactcgtcgtacatggcgatgtccgcctcagcgtcaaccgaggctggcatgctggtagtagcgtacagcaaagcaatctcgccatcttccccagttggtgtcgacgggaggtagtcggggacttgcgcatgggaaagaaatattgattcgccgtcgttactgtgggtggtgatgtagcggcggatatagggaagcgggtttttctcgtaaggggacataatgagctgatagagatggtatctgaggaagaaaaaagtgatatcaggtcagcgactcatcaaaagtcgcgagccttaagttggaaatatacccttgacgaaatgctgtcacatcatggtggcatcattttataaatcaatgcccaagtaggcttaagcataattctgttccaaggttgagcaaaaatcaatctaaagtctgcttattccctcgagcactttcttgacaattattcttaattcactatcttattaatataggagattgatgttatattgccccccccccnnnnnnnnnnnnnnnnnnnnnnnnnnnnnnnnnnnnnnnnnnnnnnnnnnnnnnnnnnnnnnnnnnnnnnnnnnnnnnnnnnnnnnnnnnnnnnnnnnnnnnnnnnnnnnnnnnnnnnnnnnnnnnnnnnnnnnnnnnnnnnnnnnnnnnnnnnnnnnnnnnnnnnnnnnnnnnnnnnnnnnnnnnnnnnnnnnnnnnnnnnnnnnnnnnnnnnnnnnnnnnnnnnnnnnnnnnnnnnnnnnnnnnnnnnnnnnnnnnnnnnnnnnnnnnnnnnnnnnnnnnnnnnnnnnnnnnnnnnnnnnnnnnnnnnnnnnnnnnnnnnnnnnnnnnnnnnnccccccccacctgcctgattatgccttattctgcttgattcctttcgcaatctcctagttatatataagacaatgctttcatttaaccccatcttcggtaaaggtcgcaaaggtctgctagttctgtatacatgaggagtctcatttatagcacgcgaccatgcatcaataattaaatgtaagaaagcctggatctgaaggttatattctgttaaaacatgccctgtagtaaaagatatgatcatttccactaagcaccgaattatgccttgttgacaagcacacgtaacatcttcattaagcagatttatcgttatcgtcatcatcatcatccttctcattcaaactccaccgtaaaaggatcggtcgattcttcagcaaagcacaaataatattcacgttgctcttccgagttctcttcccatgggatgaggagcttcctaaggcctgcgtgcactagcttttgaaaatcttcggggtccatatacgtccttatcaaaatcacttgatagtagctgaccggcaggagctcggcgcaggcgtcagaaatttgctggccagcctcctcaagcttttcagcccagaatattgcgtcctcaagatcagattgtcgcttgctggtcccgttttcgtcttcctgccgaagatatgaacacctcactttggctgctagcgcataatccggctttaggaaacggatgccctggatggattcaaaggcctcggcttgcttaacctcgtcatatgagaacgtttcgacaacggtggtcagaatatcaattggaaccgattcatgatgtaactttccctccaccaacttgaagccgccgaaatttttgagatcgtgtaggattgctggatcgcggatcagaatgtcgacatcttgtgtgactcggtcgtggccttgcatgttggcggcagcgccgcctacgagaataaagcttgtgggaatgacatcacgcaaagcgttgacgcacgcagtaatattcgctgagtcggtggccatagcaactgaatattgattagcagaggttcaagtagagaaatcacgctccacagggccaaacctgatatggcgaagaaacggtgttgcgataagaggacagaagaggatgttacgcgccgggtctttatgaaaaagagtgcattctaagtagagtattgaaaatgaggggggaaggaaaggaaaggaataggaatcaggactattgtgggcttttgtacctttgcaaaccagggaaatctcgtatgctcacttacggtttaggaaggaatgacttccaccaagaaggaaggaaccaacgagcctagatcgtaacagagggaagaagaagaggacagaagaagagggcagaagaagaagagggagaagaagaagagggagaagaggaaatgcggggtgaatacgagtgacctcgacggcctaaggcctccagataatcgttgcagagcaaagcgactgattccaacttctaatgctacgcaaagcccctctcttactggcttattctccccctgcctgtaatctcaatactgcttttacaattgggcatattccctgccatatggtagtatgtagtaaggcagtaggtacctttaatttgtatgcaaactactaataaaattaagtcccttttatcatatcaatattattaactgcttcatcaactgctttatcgttaactactttagcgactacttaagcaactgcttgaacaaccgctagcacaaccacttgagaaactgcttgagaaactgctttattagttagttagttagttagtacggtgtagttaactaacttctttaactacaacatagtaactattgcagtggggtttccagggcaggatgactaagcggctatgtgacataaaagcactcccgaggcataactagatagcaacgcagacacctttccacttccattctcagtagtcaccccatggtattctcctctctagcaccctaccactcccagtgatgactctgctctcacacctcttccgcaggcagggctgtcggtgcccctatcctagggatccctcttcactatgtagcacggaataaagtatcgtctagccagattaggcctagtctatatttattctgccggtcggattattctgccaaagttagccgatgggatttcaccgcattaattccataggataaaacaacagtcacgtgatatgcacacgaggttacgatttaactgcttcgcttcgctccgatatatgccacataaaatattcaacgccaaagtaggtgattgcataaggaggaactggcaacccgtggactaagcccaaccctattccaggattggagtcggcaatcacgtcatccgacatgtaacggtcacatgaccgaagtgcacctgtagattagttgagatactctcagtccatcggttagcatcaatccaactgtatttgctgcatccttcctgcctcctccgctggcaaaccccaacgagctcaaaagctctccacaatccggtttccaatatattccgcacccgatatgacaaatggctgattacgtcgccgatcgacctcttcaagaaacctcctcatggcccctttatcacgtatcggaatctctcgaggagcacggaatcagacactgtatcaccggcgatgctattattgggattctcggctatcccttagtcatttgcgaattttatcttgcggttgcagacgaacaacttgaagatgcccgctctgtcgttcttcagcaaggattccaagcatccccagtccgcgatatatatgtggataaggatgctagggtttcccctctaggctggccaggatacagactagtgatgccttgcgcatccgtcttcccgggggttatgcttgttcccgcgagcttctggcatatggatctctcagaatcgagtctatcgacgaacacattcctacatgattctacacgatgccgatttccaaagcggctattttatttggatggtaagcatcatagcatgattgcctctttcaactttgtcttggcttcagtctttgtttgtcctgttcgtgtactgatcttctcttaaattcctagctctgatcgatgttattgtcgaaaacgcattgaacccgggcggcaaccaacgcatatcgaggtattttaaaatgcagtatcactatctagtcggctgcatccctccggatattcttctcagtctgccgccggaggacaaattctttgtggacttatatggtaaaccgcttccaccaaaaacccggaaaagagtctccttaaatcggcagcggattcgacagggtctgatgaatgttgaagaggcatggaagtcaatccccaaaaaagctctacggtttgaagagatagagataaaccgtaaagctctgaattcgcggtaatttatgtctcatttcctaatttagggaatttcaatttagcctatatttaattggctgttgttaattcctcttagattaagagaataactagagatgtgggcttctttctatatagcctgattgtccctttgccctttcttagtcttttattgccttatgaatatagcatatctcttaagattgctagcaccgaatcgcccaacatgccttctagtgtcaagggtggtaactaggagcccggtgcgccacagacaccgcgccctactcaggatgacctcacaatcgccagcaggatattaccccagatgacgggacccagtaagtactccttccagatacatttagttcaatgactaatgataacccaagctgcccgccagaggaacccggccaacacaatgttggagccccctgaaaatccctgttgagcaggccgacggtgcagatcttggtcactaatatacgggcaattatagatctacctctcccagcaagtgtattacttgtaaaaatagctaggctgcaagtcagcaatatgaggtgtttatccactgaccatttgctgctagtaacgtggggcggatggaactcagctctcttataagtgaaggttcgtgtactcaatagtatattctttgttctcaccacactttctagacaaaccagtacgcactatgaatccgagcccctaaaagcatttcagaaagcaagaaatctcaaactctgttcaaatcgtgtatgggatcgaccgcgccgagtacggacacggtgccgcgttctatgagcccttcgctattttctacccaaatttgtcgttcaaatgttttgctgcccatccgacaccatctcgcccttcatgctactggcaaatttctcaatgcactcatcaagactaggaccacccccaaaactgtcagagtccctcttagcagcaactgcttccttccagagaccgttcatcctctccccacccaagtgcatcagctaattgacgaacaccgtcgtcgcaactcccgaggatgcacacatcctcgtttcgatcacctagatctcctgctttttcattgttgatcaaaacccgaggaaccccctcttccactttcgttggcagagtagagcaaggtggtacacgtaaactagttcccataacaagcatcaagtccgcctcgcggacctttctctcctcctcctcaaacccagtcaaatattgcccaaagaatacaatatctggctgaaccggaccgttacacctataacaacggggtatttcaccagcgagaatcgctttgtccacgagatcgtcgaaatatggtggcttcttgcacctaatgcaatgttgactcttccagtttccatgagcccagtaaatcttgtgaggaacccctgcatcttcctcaagctcatcgaaattctgagtgataacaagatgaagcagattctttctcgctagcagtgccaggaacacatggctgacagtcggtttgaaatttcccgggtgaagtgcccgggccaatgtgtagaatagctgaggctttgcccagagataccgagcatcaaatatcgcctctttgcaagggagttgcagtggagcgagcttatcataaaggcctgtgtttggagttctgaaatctgggatccctcnnnnnnnnnnnnnnnnnnnnnnnnnnnnnnnnnnnnnnnnnnnnnnnnnnnnnnnnnnnnnnnnnnnnnnnnnnnnnnnnnnnnnnnnnnnnnnnnnnnnnnnnnnnnnnnnnnnnnnnnnnnnnnnnnnnnnnnnnnnnnnnnnnnnnnnnnnnnnnnnnnnnnnnnnnnnnnnnnnnnnnnnnnnnnnnnnnnnnnnnnnnnnnnnnnnnnnnnnnnnnnnnnnnnnnnnnnnnnnnnnnnnnnnnnnnnnnnnnnnnnnnnnnnnnnnnnnnnnnnnnnnnnnnnnnnnnnnnnnnnnnnnnnnnnnnnnnnnnnnnnnnnnnnnnnnnnnnnnnnnnnnnnnnnnnnnnnnnnnnnnnnnnnnnnnnnnnnnnnnnnnnnnnnnnnnnnnnnnnnnnnnnnnnnnnnnnnnnnnnnnnnnnnnnnnnnnnnnnnnnnnnnnnnnnnnnnnnnnnnnnnnnnnnnnnnnnnnnnnnnnnnnnnnnnnnnnnnnnnnnnnnnnnnnnnnnnnnnnnnnnnnnnnnnnnnnnnnnnnnnnnnnnnnnnnnnnnnnnnnnnnnnnnnnnnnnnnnnnnnnnnnnnnnnnnnnnnnnnnnnnnnnnnnnnnnnnnnnnnnnnnnnnnnnnnnnnnnnnntctgggaccccggcgctggtactgataccagcgccaaccaagacgacaatctgtgtggcttttccagtctggataaggtcgacgattgattgaatgtcaggtttcatactggcctctgtatgatgggtggtttcgtcagacatatcttcgagtttggctatttttgtggatgatggttggaagtaaatgagtgttttggttttggagcgtcaaagaagcatcaaagcagatggctttggatggaaaagaaagctatgggttttattgtgttagctggctaggagagagagaagaaggaagatcaaagaaggtagaaatagggagcaggtgctaccaatctagggcagaaacggtctgggcaggtttctatctgcagtaggcttctgtaaatcatacatgtcatgtgttcattatccaatcagcctgatggaagagattatctcttattattcgctgggcaaagtaacatttgtcaactcagtgagcaagtctgtccagtctggtgcattgagctcaacattagcgctgttctctagcatctccgtccatatgtcttcgagaggcaacggactaagcaatgcatcttgtgaagggtacattgtcgattgaacgttgggtatttctggagggaatgtgatgctcttggaacccaatgaaacaggcgtggggatatccggctgcgaggcgttggctgttgtgagatttggattcgaagatgcagaaagctcctgtaagtcgcgagagcttactcttctttcgtgtttccaatgcctccgcaagatctccatcatggctttgattccttcacgtgctattggagagtattgttgtgcccgactgagcattcgacaagcgtcgagtacctcctcttttcgtttctctgccagaatatcatcccagttgaaacaaacatctatcagaagaatggcagctgccataaaaacgtggtgcatgactgcccatataatcgagctgtgcggtgtgaacacaggctcttcctcatccataatgcgtttcagttcgagcaccttgcgcgcagactgaagcgatacgatatgcgaataggaatatttggagtcctttgctccacgcacaaagtagtggcgatgcaagcggcagagccgcgaatgatagccctgttgtaccagcgctcgctgccatgcaagagttggtcgttcacgatagaccaccgaaaattcacgttgggatgcttgatcgtagcgaaagaaaccaggaatctcagcgcgtaccttgtgaagcttttgatctagctcaagtatcttctcgtagggtgcctcttgcccatggaaatggtagtatgacgtttcatccactatttgacgacacacaacagccaacttcaatcgacatagactgtatgacattgcggtcggagtagatagaggaacaccgtgttcgctatggtcgatttcctcatcctcaatattgagaggctcatttacaaccatatgcttaggttggatcgagtacgtccattcttggggtccactcaagaagcctattaaccttcagatatcatcagtcatagtaccggcaaggtctttgttaagaacgtaccagtcgtatgttgccaagtcccaccacagccgtcgtttgagttcaacattcgttttatcaaatccatttgctaagcgttcggtaacaacccgaggacagtccacaatatgaagccccatactagtggcttgactcacaaatgacctatgcacaaataacggactgacggaggagggcaagttcatgttggacagatgatggccaatgatcatagtcgcttgcagtccttcgaggctgggataagggatataattgctctggatcaatgcagcgcctgccaaaaatgtactgtcctgactgaattgttctgcgtgctcggatgactctatcaggagttggtaatacagggcagcagcagtgatactgaacagtagagcagtgtgcgccaagttgatagactcatttcgctcaacacgctcgtaaatcgtctcaatttgtcgttccacgcgactggggatgatgacatgatactggaagtcaaggtatttacaataataccgaaatagactcagcgcttctgccagtggtggcaaatacgactgcagatgaattgtcgccggattctcgcgagaggcgagtcgttcacacatcggaggcaatcgatcaccaggtgtgctgttttgctgggaaggcgagcgttcgggttcccgctgggagatctccgccctcagtgtagcagggactgcactagggatacggtgtcccataacaattgtctcaagccaatcggctgtcaaaaggggctcatttccattgcgactttgtgtctccgtgtcctgtcgtggagtccactgcaaggtccgaggtggctcagatacgcgatcgtccaacatgggcctccgatctgtttggctcatgggtcgcacaggggttgtccccgaggcgtagctgccatagctgcactccagtttacgcgaagaacagctactacagggaagctctctgtcgcacttcagcttcttctttcgacaggactcgcaggaaacggggtcttgtcgagactgtcttttcgggcctggggtgacgactccagaaacttgtcttcgtttcatgttttcaatctccccgaaaacagtttaataatagtgacccagcgaaagcaaagaaacagcgcgtttttcgcataggagacagcttgaagtgttggcccggagactccgcggattctccgagacgctaaaccatatctgtcaattcttcctccggggcatctagacagtagcccggagactccgagagtgattttcagatgtaattaaggagtcagatttcttataaaggtcatggtattccgtagtcatcttgcttttaactagagccatttcatttctgccaaaatgtcaccaaaggatagtcctccaactgaatacacgtaagtgaaatatacttcaagctacaagatatgtagccgaccagtgcactaacctcttctaggccccgagcatggctagttatattaggcgccttcacttgtaccttttgcaccgtggggtttatgaactcgttcggtatcttccaagagtactacacaaaaaaccagctatcctcaacctcgacatctaccatcgcatggatcggagctgtgtcaatattctttttgtttgctatatctgtcgtggcgggagcaatgcttgatatctttggaccaacggtaagcatactcttcctgaatcgtcgagaaataaaactcatacttcctttgaacagttcatggtatatgttggttcattcgggtgtgtttttgcaattatgatgacttcactatgccaggagttctatcaattcctcctcgctcagggtattctgttaggtgtctccatggctatggtgacatggccgatgctcgcactggtcggacaatatataaaagtgaagcgtgctgccgcgatggggattgtgcttgcgggttcatcgctcggcggagttatctggcccgttgcaatcgacagactgatcaataagcccaagattgggtttccctggaccatgcgaatcgtcggatttatcatgattccttgctttatcttctcttgtgcagtcgccaaatctccgaatacgcctgcaatcaatttggagagtcgtgattcaaaccagaaaagtgacgaagataccgcggagcaaaaggataagccgcagagtcacaaggcagaagcgatggccctttttcgaaaaccgtcgctgcagctactgtgcctcgccatgttcattacatactttggcatgttctcgccgtttttctacacgacttcctacgcggttgagaaaggattctcgacatctctggcattctatactgtttccattgtgaatggggcttcattcttcggtcgagtcctccctggcatcgttgccgacaagtacggaaaattcaactgttgcatcatagcaactatatccgcaggggttgttgcattgtgctggactaaagtcacatctgtggccggtctggtaatttggtccgctgcctatggctttgcgtctggagtgagttatcctcgaatggtataaacttcgaatgctgactagatttgtagggcattttatccctccagcaagcttgtgccgcccaggttgctacttctaccactcttggcttggcaattgggactgtgtcgggtgccacagctctatcgtatgacccccatatcttgaaatgataatgtagtatgctgactggaactgcagcgctatggcaaatgtgcccatcagtggtgctctgctcgagaagtacgggtacctttccctgtcaatattttcaggggtatccttgctactaggtggcttgcttttgattgctgcacgtctagtacagaacagagagcttcgagctatcgtgtaatgcttggccattgggttgaatttgaaaaagtgagaggtgaagctgatagaagatgggaagatcgatcaaagtccaaagacgattgatggatactgatagaagaggatttgacggaaaatcgtgcagcatattttccactagactataacaaaaaccaatgttcctgtttaaggcttaaatgagccataactatcacattctgataagatttatcgaaaaacaaaaaacaaaaaagaatggtcccagagggggtcgaaccctcgacatctgcgttattagcacagcgctctaaccaactgagctatggaaccgcttgatgtatgtagcatcaatttgtggttatataaagtgagtaggacgatagagcagggacaaggccacttatagaaagagtacctacagttcgtatgtatgtaaactcttagcagaattaagtcactccttccctatcttgtaccaactgtcacagagatatggcagaattctgagtggtaccaaattagaaaggcggtacaggcagggatgtgcaagtaacaactccctaaatatatattccgtacagataccagaagtatgttccaaaatttgcaagaagttccaatatttcaaataattatgacgctcgggacaatactatcccgaacgatgaaacggaccgacgacctgcgtcaatatactagactaggctaacatctggggtcgaatattcccgtgtatgtacgcatacatagattgtcctacctcctgtaagaaccaagagtctcgccgaggctattggataacggcgatttcgttcacttcctttgtggccaggcatcatacagtccttcaaagaccgtcacatcttcgaatgtcgcttctcccacgccgttatggaagaagttaattttagtcgagttggcgtaccaagaccttcatgcggttagtttttgaccaatcttccataaacaagagagacttaccgagcccaagtgcctagagcaaagcgtccattggcatatacttccagtacactattatccaccacgatagtgagctccaaagtttcaacctgttcttttccatttcgcaacacgtcgaagaggcgcagacgtcccgcctcgttatcactgaggatcccagcagttgttctcgccgcagcactnnnnnnnnnnnnnnnnnnnnnnnnnnnnnnnnnnnnnnnnnnnnnnnnnnnnnnnnnnnnnnnnnnnnnnnnnnnnnnnnnnnnnnnnnnnnnnnnnnnnnnnnnnnnnnnnnnnnnnnnnnnnnnnnnnnnnnnnnnnnnnnnnnnnnnnnnnnnnnnnnnnnnnnnnnnnnnnnnnnnnnnnnnnnnnnnnnnnnnnnnnnnnnnnnnnnnnnnnnnnnnnnnnnnnnnnnnnnnnnnnnnnnnnnnnnnnnnnnnnnnnnnnnnnnnnnnnnnnnnnnnnnnnnnnnnnnnnnnnnnnnnnnnnnnnnnnnnnnnnnnnnnnnnnnnnnnnnnnnnnnnnnnnnnnnnnnnnnnnnnnnnnnnnnnnnnnnnnnnnnnnnnnnnnnnnnnnnnnnnnnnnnnnnnnnnnnnnnnnnnnnnnnnnnnnnnnnnnnnnnnnnnnnnnnnnnnnnnnnnnnnnnnnnnnnnnnnnnnnnnnnnnnnnnnnnnnnnnnnnnnnnnnnnnnnnnnnnnnnnnnnnnnnnnnnnnnnnnnnnnnnnnnnnnnnnnnnnnnnnnnnnnnnnnnnnnnnnnnnnnnnnnnnnnnnnnnnnnnnnnnnnnnnnnnnnnnnnnnnnnnnnnnnnnnnnnnnnnnnnnnnnnnnnnnnnnnnnnnnnnnnnnnnnnnnnnnnnnnnnnnnnnnnnnnnnntcctccccgccgccgcttgggtggggggggggtcgacgatgatggactcgttggagaattggtagtagatagttgtagactcaagactagaggataaaacctggaaaccagcctggatgccagagtcacgggcagaggtcgggaaagatatatttgctgtcagcacgaagaacttgcttgagggtgaggtattgaagggcactgctccagcattcgacaacgttttaccagactcgacaaaagatgagccggatgtgagagcgctgtaagtctccctggaaattgagattcccattgtttcaaggtcgatctgaccagagtcttcgcgggccacgcgccacgatgtcaaggactcacgcgaaagttcgttatccaccacgttagagatagtgcggacattcagctctcgcggcagtaagagggccccggtccagttttgttgagcggtagggaatcctttcacttgctcgaatagatctccagtgagccagacataggaaatgaaccgatcgggggcaccgctctttgtggatgcctgagagctggccggcaagatcttgcctgcagcagcatatgccgacacgccccagtcaagcacacccgccatggttggcttgaaagtgacagagccgtcatttgtgacattgccggtcacccacagcatatcgcgaatagaggagacttgaggaacgatgggaagtcccgaaccctcagcaccgagggttatgaatatctcgccgtcttcactatacccctctgcattcagactaaagacgttgccaacctcaaagttgaagccccaacccccggcccagtcaccctttccccaagtggtattaaggggctccttccaccattgcccgagatattcccaatattgaaaatctgcgtcgttctgacggtagaggaactgacaaggtccgacaccgtggacaccgccagatatggcgacataccatgttccttgggtactattgacagatttgtccagaattgggctttggaaaacgtaggggtcacggaaagcggtgacattgagagcaaacggaggcgtagggatcacgggcccttggttgagcttggtgaagttgtgaccaccgtcataggaaacggccaaggattgtgtctcgcttccccgggtgtaggggatggaccagtggattgggaggtatgatacagaggtatacagaagagttggcatgccgtctataccgcttggaatgaccgagccatcgaagacagaaagagggtcgttctttcctcctgcaacaattgacggggctccatcgggattgaggtctttataggtaacgagatcgtcggttgtcgctcccgaaatcccactgtaaagccaacccacgtggaagagaccagtcttgggatcggtatagtgcccgcacgggtcgcctatgttcccagatggagggagaagatgggctctgggtctccatgtcttgaaaagagatgcgtttgccagggtagaaaggtttggcggagccgagttatagtcaatcggggtatggaaatcaacagccaatgcccggtttgctaaacccacggtgattgcatttgatagcttcatagtgtagatcttgggtagctgttgaacttccggatatacacacctttatatgtctaatcttgccatgataaattgaccgaggtgggatgaagacaggagccaatagaaataggatctccttcaatatggatcttcttgtgacgttcatttcctctttggatggagtcggcagtttccgcaagtcaacggtaaaaccgcggggaaaccccggatgacaatttccccgatgcaaaaaaacacagggtctatgattttagttctagggaatagacaaaggcaatagccatggccgggtgctcccaggtgaagtattgtcgggaatccctgtcgtacccaaattggttgacggaaggccgcttgagaatcgttcgatgcctgatgtgtgccggtctggtgaatgaccagagcttgtggattctcacttgcaatgggttcggtggttggaaaactgggaggatctacaatgcctcggcaggcgtggcgtatcaatcacgacgtaatatggagattttccccttcaacccttgcatcaagaaagaagggtccacgaggatcgccgaatgaataagagcgccccgctcactcacactaagggcttacggcaaattgtgaacatatttgcgagcctggaagagactcgaaatttcaggtagatgaaagtagagccaaagcttggacacgactcacagctaagcataacctcaagccatgaaagactggtatcattttgttgaaagatccgtatatacattcaatcataagaaaaaccaagaacctagatcttctccgaagagtacaaacgaacaggcacgccataatcatgcgacatcgtaagattagatagtttgacaggctcctgtcgaggatgggggtccgcgttttcgagggtatcgaagtgctgcatcaaacgaacgacggtatagcttgcctcagtgagagcgtattgttctgaaagattgattgttagccactcattcaaggccatcttcgattttgtttctccggggaaagagaacatgcacaacttacgaccaaggcagatacgcggcccaccattgaaaggcaggtattcccagccatgcttagcattttcttcccatcgctcgggccggaaggaggccgcatccttaccccatagatccgtccgacggtgcatagcgtagacactgtaggcaaccatcgtgcccttcttgatataaaccggggattggtggtccgtaccaccgccgaccggtagggaggtgtcttttgtcgcaatgcggaagttgagaggcacaggaggctggagacgaaggactgggttggagttagtcggatatccattgatagtacacagcatatactgcatcaactcaccttcattcaacacatatcgcagataaggaatatccttcagcttcgtctgagtcatttccgaccgtggattctttgcgtctccgaaaatgtccacgatctcatgacgcagccggttccacacattggtgtgacgggaaagatagaagaaggtcgagctcagcagactagctgtagtatcgcgaccagccaatagaatattgagcatgttatcgcgtagaattttagggtcatccgtctcagcgaccaatgcttcgaggaagatataccgaccgtcagcatttcccttttctgagttccgtttcgactctagagcgagattaacatagtgatcgacaacttcgtgcacctggcgatttgcctcgcggaattccttgggattaacaacccaataaattccctgggcgcgactccgcgcagcgagataatcctgcgcggtcccgaaggcgttggcgaaaccctgcgcgctaccgacggcgcatttttccagcacgcctgtcttcccagaaggggggagcatgcaccccacggattccccgaacaggaagtgcgttgccgagtccagggtcagcaggaaaaacaaacgctggatgtcgaaactgcttctatccttggggatcaggtcgatcaggttggagatgtggtcgtccaacatggaaagatcggcgacctgtcacctcggtcaatcacatgtgcataaattctccgacaaagttttagttacctggtccctggtgaactgcgggcgcaacaatccccgcgcatgcgaccacccggcaccatcgagggtgaagatgccatcgcctagcagtgggtagaattgttgatgtcttgttccgagagagaaatctttgaattgggtcgcgagaattgctttgacattttcaggctcgatggtggtcatgatattctgagacaggaatgtctgtctgtaggtatttccatagacagcatattcgtcacagagatactcgatccagcgcttctcacgaacagccttactcaaccgaagaaagtccggaataccgaagaaagtcgaagagcccgaacgagcaggcttgcaatgcagagccctggattgtttacggtgatgacgtagctgtacgaagtagcgcacaaccaagaaggcagaaagcacggcaaccagggcaaatgtagggaatagcatttcgttaacgtatatgaattggaagaaacagcagtcaaatatgtgaatggaaatctaactcttatgatatgtccatggcctcccacgtgaaaaaagcggagatcgcaagctgattcaaaacgggaatagtgtcgaatggggagagaccgtcgcttgaaccttccagggtttagcaattaccaagccttggcctagaagcatccgagccattctttcaacgccgtgcggaagtatcctcgggaaatcgcccctggcacaaatgtcgtgcggaaatcaaagcagtgttccgcattctgcatgatgtaaccaaagaccgtattttccgccgtctcaacattgcacttggggatttcggtcgtgagagacactccttgcggggctaaccgagtgccggccgcgaggggcgacaaagtgcgccacggatcaaactggccgccgctccagtaaacgttggacggacgaatggtccatccgccagtttccgtgttgatagcgtcgacctgcgggtgtttagggaacagaccctttttgacagcctccgggaatgatcgttcgcagtattcctgcgcataatcgagggtctggtatctggacagcaacgagtgaggcccgaagttgtcggtctggaagaatccccattcggtgcagtactgccatgtccagctgatggtgtctgggtcggtggatggtgcgccaagatcgcatacgagcggatcgctggcttcaagcttcctgcagttggtattcaaattcatgttgaccaactgcgtgaaaggcggccatgacgcatatcgctccgcggcgtacttcttcccccggctgggagcgaatccatgcgggggcgccgctgcgctagtcttcgggtcggtctccatgtgctcgcagaatgaccccagactgcccaaaccaccttccatgccataagactggtaatagtagtagatgatcgtgagcgcggcggtgaaatcgccgttgctgtttttttcggcgccttcaccgaagaattttcgcttgatggccgccgcggacgatttgctcttcgatagttcctcgtcgatgtattcaagtgcagccttgatgtcgctggtgcagttagagtgtccatatgcgaccatgccgtcatacacctggtcgaaatagacgctcatgtcgatccgcgcttccacgggcgcggaggaagcgtaggaagcataaattgtatcggggtacaaatgacgggtgaacgcagctcgcatgccagagtacgagcctccaaccatgacccatggtgttgcgcttggagttaggttcacatcgctgtaattttcgcgagtgaagttggcggcaaagaatgggatgtctgcaagagcctgtttattgttgaggtactggagatgctcaggcctcatgttccggctgacgttgtagggaagagaatccccatagtatctacttggtgttaattgagtccgagctttcactggggagaggatacaaaccggtgttcccagacaataccgattccaccgaaatccctgaccaactgatagaagaacgtggtcgaattgcccagaaaggtttgagccgaggattcggcatttccttcaccaacatcatatatgaagaccggtcctcctgcctggtaatgctcttcggatacccaatagcggttctggtaatcaccaaccgaagagttactgtgatcaatcgggagctacacatcgtcagcattcatctccgtcttcaagaaattggaaagtctcacataccgaaacatattctgcctcaacaaccacatcaagctgggcatttgaaacagcatacaccgaggtcttctgactgagtaggatatccggatagacccccagctcagcggaaagcttcagatcgcgcttgaatgacgatgtgacaattcctgcagctgtaccagacagcgcagccaggactgcagtcccccgaacgatagttgaaaaatgcatattgactgacagtgccttttgagtctctcaaaaactcaaggacacacggatagagaatagctttcgactatctcgggtcccttacagaatatatatgcattatggagataggctacaagcgcggaaatgacaaggcgaatcagaggacattatatgagaacaatatgataagaacaatatggttgcgtttgtcgcaaggccgcagtcatctggaaaaggtggattgcgcattcggggcacccgataggatcagcgacgagtggacaccatcaggcacacccgagacatggccatcgcgtgcggccagtagctgcgtctgtatgacccggggcgagaggtcacggagtctaatttctggggagtttgagttggatgtaacctacttagcacggcataaggtgtatgtctcgaattaattagccatttcccccaattacccctcgttttgattactatcagcacttggcaacgctgtgataactgtgcattgcattagtgatgtagtacctccctgctagctcatgttgactatcacttcccgattcggcagaatgcgatcgtcgacagattcagcgaagaactcctgagacccgtggtgtttatcgaattcgattaattaactttctagtcttagaccgagcaacaaacttccgcatctgggtttatctaaaaacaagcaccacgcgacgtccaaacccccgtcactgggggtggatcccgaaaccaggtctgaaatcggggtcgatcattggccatgggactccgaacaggtcaaccggactccgaacaatatcccgaccttagtattgttgtgtgtgattgtttaattagcatcgccgtctctctaccgattcaattcatgatattgtcttgtctcggcatcttcctagaagcacgtctggaaacggtggttgtggaatgttgatctggaatgtctgcgccagttggaaaagccaattttgcgctcgacgtagaaacaaacatagttcactgtggcttggattgacatggaaggattattccacatgcttttcttcttcacgggactccgggaccaggcccgtccctctactacggctagagtatattatacatcaatatcacatcaatcgaaaggttatacacggaaagtcttacggtttatgctttttgccgttcatagagaagacatctagaaagactacaaaaaatacatgaagtttaggcatactcttgtctatactaattaagactagcggtgagccagttcaagatctactacagtaaaatatgatatagcacactggccagactagtcataatgtgatacaaaggtctcctcggatatacgaaggaagcaagaggaggcatcatggatgttgttattgtatggtgaatcctggtgattatgcggggtagaactacgaggttatagacctacaggtactaaaatatacaagctcatctagttaataacctagttagtaacctctaatttgtaatcatgtaaaccccgatattcgaagaatatttgttccgaatcagagtctaacacatgcttctactaactctgtgtaaggtggcacaattccacccataggcaagaaaggcaaacatacatcgttactctgtaccagacttttaattgatcattcgcaggataattatttgaaatcaagctacacttagagtacactgtggcaagagaaagaaaagaatacacctgtgtgtcccaaaaaggaaagtctgacgaggcctcggcacgccttccacctttatcaagcccctcatcccatcgctttctccaggctgctcggctatggaaatcggactcggcccgatttgcgactatggcctgcagagtgtgacgatttgtaataatggagtatgtcatctttgttacatgaagagcaagtgacctccacgggcactccggcccagtttccaactctgacacctaccagcatataaagccacggcgtcccttccctcacgaaagccacttcttgaataaccaccctattgcaaaggaagtatccaatcatgccgcaaacatctcgcttgcaagacaaagtagccatcgtcaccggatcctcatccggcctaggacgagcgattgctattcgctatgcccaagagggagcaaaagtagtctgcgctgacctgacaccaactgcccgatcccaagaggagtctaatatcacaacgcacgatctcatcgtcagggatggtggtcaggcgaaattcgtgaagacggatgtaggggatgcaaagcagatggagaacttggtccaggtcgctgtgaaagaatatggacgagtggacatgtatgaaatgataatgaaggtcttcgattatccttctgacgatttatttagtctagtcaataatgctgggatcagcattgaggcacgcacgcctgctgtgctacatctgaccgacgagacaacctgggacatgacgatgcgtgttaacactaagtctgtgtttctgggttgcaaatatgctcttagtcaaatgctggctcaagaacctcattcttctggggaccgtggctggatcatcaacatttcttcaattatgggtatgattggtgggccggagaatcgtgagtttcaactcggtctgtggatctgaatgttgctgatacttgagctagcgtcgtactgtgcatcaaagggtgctgtgagtaatctcacgagacagatggcgctggattatgcctctgataacattcatattaatgctatttgtcctggctgtaagtcaattggtttgaggattagctgaatattcactgacaaagctttagacacccaaacagctatattcaaagagacaattactaacttgactccttgggaagacctaaaacggcgccatccattgaaaggacctggaacaccggaggatattgctcgtatagctgttgtgttggcaagtgatgacgcaaactggatgactggagtttgtcttccagttgatggcgggtatactgctcgttaagtagtttactgttagtctattgacgcttcacgattttctagctgctctcctagtgcaattttgaagtgttcgaaacagtatattcctaagcttgatatcagaaacaaaacgacttgactacattaatgcaattgtaatgactaaaaggcatctaaaagctcacgcaacatattctgggggtgcagccaccgccgccttcggggggcgtgacactctcttaccttgaggatccgaactcgcagcttgatcagcccaattccgaataagcatagtcacctcctcatccctgctactctgggaagcagtatacccaatggagtccttaatcttagtggaagcaccgttctcaagcagaagacgagccatctcaagattgcgagtatcagcagcgagatgaagagccctcttcccatcacctcctttcagatcaacggggacgccattatcgagaaaaacctgaacaacatcacatttccccgcctcaacagcctcatggaagaggagctccttatatccatcccgcgctttgggcgagaccctcttactgcgaagaaaaacatcgactacatcagcatgtccctcttttacagcgtagacaagcggcgtatgctggcaaaaatcctgcattttaacttgcgccgtcacaccaatcatgcgaagtctccagcccggcttatgggcgtcgtcgtattgtatgagaagtttgcagacttcgtggtgaccgtttcgccaagggcggaggattttgtcgagggttgaagcttaggagctgaactagttctgtgtttccacttttagcagcaaagtgtaacggtgtctcgcctcgtttgttgaaagaacttcctgtcgctcggtcgcattcgaggagcagtcgggctgtctctagatggccgccttttgcggcgttgtggatagggagtgcatcgttggcatctcgggcccatggtgacatgctcttttctaggaggagtcgggcgatgtcccagtggccttgttctgctgcagcatgaagaggtgaggagcctagtgagtctaccacgtggatgtctgctccgttgtcgagaagtattttgacagcttcgagatcgccgctttttgcggcttcatggagtgactcatgggtggtttcatttgtttctcctttgttggacatggctttgggatatgtaaactatgacgtggtcagtttcgaaatagtagactatcccggggtagtgcgcatcttttatatgcctgaaagaatcctcggttgtagtaagaatcccaaattttgggtgtttgctgctcattggatgtgtagcctgtccgatcttctcgtatagggaaaataactgcgccccattaatctagagcgaaagcatctggtcgctcgttaaatattacttcttcttggacaagttcatgatgatctcaattcgaggactaagaaatactcagcccataaataccccaaggcaggctctcccgcttctgtacctgctctctctctctctctctctctgtacatgtcctagtaggtacggagtaggaactaaaaggacaatgcgctaatcctaatctagttgaaagtaagttgactatataatggtaaattaatgcgcgggatccatcagtatgaagctattcagagatcaccctatcaccatggagtaattcaaatggcttctactaccactaccattgatgaagatatttcaatcctgaaaactgcattgaaatgctagatagtagagtattgaatgaattaaatgtgcctagtaacgaggttctagatctggggatatccccagggaatcacaacattcgcctcagaaaaagcaatataaactttctcccagccaccgctaagcggtctaccacggcaatacctctccattttgcttccttcctcgtgtgttaatttcttttgccttttcattgagtcatccccaaaatatcacaacgcgaattatgaactatgccctggcacgactaaattccttctctcacgctccatgaaagagagctggacccgcccggttccagtacataccccaagatggcaaggcaagcaagtggaaagcatcagcatagcggcatgctatctgatgttcggggataatgtcaaactgttactgaagtgataacaacagtaaacccgtctcgtcatccaaatggggttaaggtacggagtagtgtgggcaattgttaaatccaaccaatgaacactcaaagcacccctgtgtactaaccggatgtagttagcatattgtcagcatcacccttaactacttctttcgcggatttaagcattcggaacggactaaataaagaggtatataatcggcattgctctcccataactagtctctcttttgacctcacgtacatcaattacatcaattaccaaaatgcatcttatcctcacaggggccaccgggctggttgggtcctcagtgctcgacgccatgctcaaaaacgcagcagtgtccaagatctcaatcctgagccgaagccccgtgcgaatggcagaagacgcaaaagatccacgagtacatgtcatcacccacacagactttgaatcatacaagccagagctgctcaaccaattgaaagatgcggatggatgtgtttgggccctagggataagccagactaaggtcaccaaagagtacgagagatcccactcctacgtggatatcagaactaataatcactagacaatacgtcaagataaccaaggattataccctggcggctgccaatgcgttttccacaatcaagccatcaaatcatcccttccgattcatccatgtatctggcgaaggagccacccagactcctgggcgattctcgccgatatttgcgagagtaaagggcgagacagaagcgctgcttggaacgctgtccgagcaaaatccgacctttcgggtcgatagcgtgaggcctgcattcgttgatccggcgacgcacgatgccatcaaaccatatattccatctggtgcaacggctggagttgttgcaaatcttggagtagcgttgcttggcccgggtattcggtgctttatgaagtcgatgcattctccaacggaacagcttgggtcgttcttgacggaaatggcgatgggacgctatgaagcaaaattggagggtccgggggtattcagactgggaggaggttatgtcattgagaacattggtatgcggagaattttggggctgtgagcatctaagtatttaactgtttttttgttcttactcgttcctaatggcctaataatcaactccaccgacaattgacaccgattcgaatttggcacgcaaacttaccccctccactctagtctgaaagggaaggaaaatgagaagaagccatatgttgaattgagctaatggccaggaagtcccatcctgccttgggcagtaaggctacgtcaaccaaatttgtattccagaaagacaaacaaaaagaaatactgaggatatgacaaggtcgcataagcgggcggctatttttgtacagtgtatacacttgaaagcatatattatctaaaaatctcaatgaatatctgtcaactgcctaatcataaagaaatgaaagttagtattaaccacgatagtaaacccgggcgatcatgactcgaaggggaagccgggcaagtacaaaggatgttgacagatataaacatgacctggcgatgtctattgagccccatcttgggcaggaaggtgttgagaagcgtaacagctgccaagcggattttcgctcaccgaggggatattgttctttgttaacacagcgtaggacatatttgggatttcttatccaatcaactccacgtcctcgtggagatcggggttcacagaacgctgatctcgacctgtaaaagtgacacaatagacaatcctccccgtctgaataagaaaccttttaaagaaacatccttatgcttatttatgacgtgtcgccaatcttgccttcattacgaatataaataaagagacgaactgctgtactgaaacggccacgccacatcagcctactttacttcgatacaagatgaagtacttccaacttggtagtatcctcgccttatgcagcatggttttggccgccgcaattccagacgcctcgcctgatagtcttccatgtctaccacaagggggaggtcgcaacaacaaacctattgtgccgggcaccgagtgtggggatttctggtagggctgatctgcccatcagagcagacatgtttgtgaaaaggtacgtagatcctttcccgacagtttcatcttagaacataaacttactcgactactagccgtgcttcagagcgtgtttgacctggctcgaccctctgccttggtacttgctccgctggattgtgaattttctgttattcgtgccttccaatactcctattttggaacaatctgtttgtatgactcaatgtctcgggatctcacgttctttcttcgttgactatgtgtacgatggctgggagccatttcaatatcattctttaacggtgataattctgtgtagtacgctatccatgatcctttcgtgatatcacagtttacatatcttcttgatcgatcccatacttttcccagttcgtagaaggaaagagaaacgccaaaggccaaaaataattatatactccgtagaccgcaaagcgcgagagagggtggttgcccgagaaaggtgcttaggtaaacatgaaggcatcaacttcctcttggcagagggccactaatcatcttgaactctcaggaacctcatgacctgtacggaatagtcattttgaaacggttgagtgcatatccagtcacctccttattttttccattaggaagtattgagtgatgaatgcgccaattacctccaagataacatccacgtccccaatgctgtctcggcctttcggcgaaagtagtccgcacttcggaaagcggaatgattcttttccatcaaataaaggcgggatccatcacagcatcaagatgtttcaagtacatatcggattcctccactactgcagacgctccgtgggattgaaacaatcgtcaccccacacggagttacagggggtcttggcaaggagctgcatgcaccctggccttgtgcttatttttaacaaccggccttagtctcgagtctgcagattgtccgttcctagaatggcaattatccagctgccaaggagccagaaacgtcgcgcattggtggaactatgggcaaattcatgcaggaacggagcttcagttcgctgccgaatctccaccttccaacatggagcgtttcaacatgaagaaacaaaagtgctctcctactataatatgctgcttgtctgcccttgatagtttcttgtgggacacgagaaggctctctacaatacacgttggacatgatgtttttcaagtccttggccattgcttcgctagcactttgggctaagcaggcatccgcggccttcggaatcactactagcactgcttcctatgtgattgatgctggctctacaaacccgcttaaatttaccgtcagccggacaaactgtgacattacttcgatcaattactatggatccgagcttcaataccagtcgactggatctcatatcggatcgggtcttggtagcgcaactgtgtctgccacgcagagtggtgagttgagaaacaagacgtctgttggaaaatattctgatcagtataggcgactacatcaaggtgacctgcgaaacatccaccttgacacactactatgttgtccacaacggagattcgaccatccacatggcgacatacacaaccgcaggttagtgttgttcgtgcgcaaatgtgttttttatactcattataatcagaacctacaattggagaacttcgatatatcgcgcgcctgaattcagccctgctgccgaatgaagagccattcggtgttgtctctaatattgcaggtggcactgtcgtcgagggagaggatgtggtacgtttttttctgaagctttttttcaatacaaacagctgacacatattagttcttggttagtggacaaacgcgaagcaagttctactcgagcgaacggtttattgatgaccacatccactgtaagaatacctctaccctggccgatgcgagtcgatttaacacaaacaggtgtctctggaagcgcgcaccgtgtctgcatgatcttaaatcaatatgagacatctgctggcggacctttccatcggtaagctcctcatacagcatgacttgatccagactaacatgcaccagtgatatcaacaccaacaatgttggttcttatactggcctatactggtacatggtatgtggaatctgtcgctcaatcagtaactgcctcttactctatacagaactccggacacgttcagaccgagacctaccgccagggcctgcacggcccatactcgatggtcttcagccgaagcggtacccccagttccacccttgacacatcgttctttgccgatctcagtatcaagggatacgtcgccacatctgcgagaggctatgttacgggtactgcaaccggggctgactcgactttcaaatgggtggttcactggtaggtccgatgcaatacctggatgagtacatatctaactccaagacaggtataactctgccgcacagtactggacctacacttcgtcttccggagctttcacctcccctgctatgaagcccggcacttacaccatggtatactaccagggcgaatatgtcgttgccacctcgtcagtgactgttactgccggatcaaccacatcgaagagtatctccgggtctgtgaagaccggaacgacagtcttcaagattggagactgggatggaacgtaagttcattgattttaacccacataattgttccgatattgactgcccatagaccgaacggcttcctcaacgcggccaaccagctccgtatgcatccctccgatacccgcatgtcttcctggtccccgaccacctacacagtcggcagctctcaagtctcttctttccccatggccctcttcaaatcggtcaattcacctttgacgattaaattcacggcatcatcttcgcagaccggagctgcgacgctgagaattggcacaaccctctcctttgcgtctggccggccccaggttgtggtatgttcaagcacattcactttctatactcttagcatgtatctaacttttacacagttcaacaactattccggcgccaccccggctgccccgactaacctcaactcccgtggcgtcactcgcggtgcgtatagagggtttggcgaggtttacgacgtttcgataccggctggaactatcgtcgctggaactaacactgtaaggacttttgagcccagtcagatgatatgatgctaatccggcctagatcaccatcagcgttgcttctggtagctctggagacacttacctgagcccgaactttgtgagtatctttctggttatctggtctttccgatgtaagcttacctgtctcaatagatcttcgattgcgtggagctcttccagtaaataattgggacaaacgattgagttttggaacgcacagaggagcataggggaagtttctctaagtaacaagaatgcgaatcgccgtatcttccaatatcacttaatttcctgttgtaataacgccttttgaaggtaaatcacagaagatgtcataatatagactagatatcatatgtagaaaaagatctaagaaaaacacatagacaatgctcaaacccttgaatggaccaaccttcccccaacccagacagccttcacattccgatcatcgccactccaaacccacttctgaatcttctcctcccaattctccgtcccaaacagatcaacatttcccacaggaccagccttcacaagatctgaactaccatcagaaacaacatccagcggactcgcctccaccagcttaaccccaccaagccgaatcagctgtacatcccacaacatccccctatcaaacccaccaacatcgctcgccatatcaacaaccgccgcgccaccacgcgtagcaaggtaaagactctctgaaacagacaatttctcccgtccatcagagccatcaccctgaggatgatccctttgccacgcagccgattgacccagcaaccgcgaagcaagacaagcctggcgcgccgcctcaagaatactaggactatacccaccactaacatccgtccccagcccaaccgtaatcccctcatcaagcaacgtcctaacaggacaaatcccagaccccagcgccgaatttgacgccggacagtgcgagaccttcgcttcgcgcgcgcggatcagagaccgctcatcggccgagagatgcaccgcatgcgcgagaatcgtgcgcggcgtgagcaggttgtacttatcgtagacggcggcgtagctgcccgcctccgggaagagctctttgacgagcgcgagctcgttgatgttctctgagatgtgcgtctggatgtgcagcgggggcgaatagctcgctgccagctcgccgaggccctgtagtgcggggcgcgtgcatgagggtgcgaagcgcggtgtgacgatcggcttcacgagcttgccttctgggtctagggtgtggatgtgctcgattgtctggcgggttgcgacgatggagtcgtcggcgctgaagtcgcggtagtagtctacgcagaagtctgggttgtccatgcaggcgcggccgatgaaggcgcgttggccgcgcgtgtggcagagcgatgagagggcgtttgtggcggcgacgtggttggttgcgtagtaggaggcgcaggttgtgccgtgggagagagtgcgggagattacttggtcgtagatttgctgcgctaggaggggtgtgtctttagggtcggttttggtttggtggcctgtttttgggtccggtggtgacccgaaccgggactctactgggaatgtgtaggtctctagccagtctaggagtgttgatgagccgaagaggcccgcgttggggtattgtggggcatggatgtgggtgtctgggtagatgtagttaatattaagatttggccgtccggattagggtttaggaagttggatttgatgcataccaataaatccggggaagaagaactcattttgctcctcactcgcggtgacaatcttcactctgaccttcgaatcatggccccgggtctcaatggcgtcgatattaacccaaccattcctattcatgaattcgatgaactgattctcatcactgccgtgccagtcccaaccttgaatgcggccatcagcagcagagacccataatgcgccttggttgcgagacaattcaggcttggagctagagtctgaaagaaccgtttgaatgaatgtgccacgatagacggtaaaaccatagtccgtttgcgatcccatattggcgggatatttaaaaggcccaattattggcgtagatatgatcaagttgcggacagatggcgctctccaaaaggactagaccacgaataccgatgtatattatcgatgaaaatgcagatcagtctctacagtggaaataaaaagaccgaaagaccaagtcgaaacgaacaaggcgaaaaaagagggtcaggcacacgtttatatctgtcttctggttacttcttgccaagcgagcggctgagataggtgtccggaaacggtggacccaagatgtggagaatttcgatgttgtccctgcttgattcgaatgttcttcagcttcctttgcggcattcaaggcttgattgtaggttgcgaggatgattagggccacggcgagtattggggatggcgggggtcggccgtctccgatagcaatacggtgaggatacggtatttggagcgggtgagtttttttttgatggtgtaatttacggacgggcagtactgtatggtcacaaagcaccgataaggccgtcaaaagcctcaagtttacatataaagctagtgaatgtcgtgatttgttactcttcttattgtttcaaagattttcttacactggatcgaattgaatgtctagaatattttttattctttgaattgttttgttcttggtatccatggatgccggatgattatgttgaatcgatccagcgctcacaagaatgtagtctgtaggtagtctttgttaccgtcaatataaaaaaaatgttgaatgtatacacagagaaaaggaagcatcagaacgagcccccatatataaaaaaaagcaatcagcgcggcatgggtatcatagatctttcaagatctgtctaatcagtatcctcgacaggcccgcaagtgcagaacaagttctggtcaccaaaggcatcatcgacacgagtcactgtcggccagaacttcttctccaaaagcaaaggcaacgggtaagcagccttctcacgggtgtaagggcggtcccactcggtaatgagcaggtcgcgctgagtgtgtggggacatcttcagcacgttgccctcgcgaggctgggcaccagactcgacctcgctgatctcctggcggatggagatcaaggcatcgcagaagcggtccagttcagccttactctcggactcggtgggctcgatcataagggtgttggagacgggccaggacatggtcggggcgtggaagccgtaatcctggagacgcttggcgatatcaatggcctcgacaccagaggtctccttgaaggggcgcacgtcaagaatgaactcgtgtgcgcagcggccgtgctcgttggtatataggatcgagtagtagggcttcaggcgggagaggatgtagtttgcgttgaggagggtgatcttggtggcatgggtcagaccgcggtcgcccatcatgttgatgtagttgaaggtgatgggcaagatgctggcactgccccagggagcagcggagatgggaggggagaaggtgtcgccacgcttggactgcaggtactcgctgattgggtgcgagggcaggaagggacgcaggtgctcgccgacaccaatgggtcccacgccggggccaccgccaccgtggggaatacagaaggtcttgtggaggttcaagtggcacacatcggcgccaatctcaccgggcgagcagagaccgatctgggcgttcatgttggcaccgtccatgtagacctggccgccgtgctcgtgcaccaggcgacaggcctccttggcaccgggctcgaacacaccgaaggtgctggggtaggtgatcatgaacgcagccaactcgtccttgtgcttctcgcacttggccttcaggtcctccagatcgaggttaccggtcttggtgtcacacttgatgctcacaacgcgcataccagccatggcagcactagcggggttggtaccgtgagcagagacagggatcaagcacacgttgcgcttggcatcacccttggcctcaaagtacttcttgacaacacgaagaccggcgaactcaccctgggcacccgagttgggctgcacagtaacctcagccataccggtgatatcagctagctggcgctccagatcgtcaatcatctttgtgtagcccttggcttgctcggcaggcatgaaggggtgaatctgggagaactcgggccaagagatgggaatcatttccgtggtagcgttgagcttcatggtgcaagatccgaggggaatcatggagtgggccagggaaagatccttcgattcgaggtggtggatgtaccggagcatctcagtctcggagtggtaggtgttgaagactgggtgggtcaggtaagaggaggtacgctcaaggctggcgggaatagtggcgagaccaagagtaccatcaacctcgacgggagaggcagacttgtgagcggcaaagacattcaaaatgcccttcacctcatcccggccaacagtctcgtcaagagagagaccaaccttgtttccacccagacggcggaggtagacagaggcagcgcgggcctcggccataatggcatcagcttccgcagcactgggcagttcaatggtcaaagtgtcaaacacaacgccaccgtcagcgctgttagagcggacagggacatcatagcccaagctgacaagcttctcgcgcagcaatgacgtcatggacatgatacgctgggcaatggccttgaggccagcagggccgtggtagatagcatacatggcagtcatgttagcaagcaaagcctgagcagtgcaaatgttgctggtagccttctcgcggcgaatgtgttgctcgcgagtctgcagagccaggcgcagagcccggttaccaaggcggtccttggatacaccaacgacacgacctggcaccttgcgcttgtacttgtcagcacaggcgaagaatgaggcgtgggggccaccaaaacccatgggaacacccagacgctgggcacttccgaacgcaatatcagcaccaaactcgccgggggccttcagaacggtcaaagccagcaggtcagtggctacacagaatgtaccaccctggccgtggatagagtcacccagagcctggaagtcgtagatacctccctcggtatcggggtactgggcaagtacaccaatcaagtggtccttctggtccttgacgatcttgaagtcatcggccaagatgtctccaatcacgaggttgattccgaatccatcggcgcgggacttcatcactgcaatagtctgagggtggcagaggtgagacacaacgaaggacttctcggccttcttctgcttggaagtgggcattgtggcgtaggacatggtcatagcctcggcagcggcggtggcttcgtccaaaacggaggcattggcaaaggccataccagtcagatcagcagtcagggtctggaagttcagcagagactccaaacggccctggctgatctcgggctggtagggtgtgtagctagtgtaccaggcagggttctcgagaacattgcgctggataaccggaggcacaatggtggggtagtagccggttccaatataagtcttgccggagatatcaatctgcttccggtaggtgtccagcagcttgagcatatcggtttctcccaaacctcccagctcactggagcggtacaggctgatatcggcatggggctcggagaccttgaggtccttcgtggagagaatgtctgcgggcaggacctgcttcacgaattcatccaaggatcccaccggcgggtcgagcacggcgagcatctctgccgcggcgtccggggaggggccaatgtggcggcgagggaaggtatcgagaggctggaagatatccttggggtggatctctccattgtcggagacggagctagtatgaacagcacgacgaggcacaggctgagaagtagtcaatggtctccgagtgttcaatggtgacaatgaagatcgggcaattgaaggcacacgaacacgcgaccgcagagcaagctggcggccgccgcggagggcgaatagtgatgccgccatactgagaccggaggataatgagggctttagggaaagcactcaacacatccacaagtaaatcagtgaatcaatgagttaggaggatgaagaagaagacaaaaagagccacagctccagaaattaatatttattgcccacgcctctttcctttccctgtccgatcgtccgatgacggagaacctgtcgggaaacgtacagcggcgataagaaattataagaacatttcttatctgaccaatcgcagctgccactatttgccactggccccagcttgaccactgaccgccttctgctcggagcaactagccggtttcccgtcggggaagtcacgggccattgatctacgttactccacgaattccccgccgaaggggaagctccgatggtctcatagctttccttgagcttcggtttatggtcgtttgggagaatacgacatactaaaaataaaaaaggcctgctttcattactatctcaatcccgcctaggacagaatatttcttcgggctcaaatcgtatatcggaaggctgcatcaccctcaatgacccgctttccccggtccgcctgcttattacagatccggaaccacagactcaatcccaggactagcaggacgatgagaatgttacacctggtgaaacaaagtcagtacacgaaaataatctgagacaggagggacaacgtacccaatagcggcatacattccgggtcggtactcgggtgcgtcctgttcccgaaacaccaagctactcacgataccaccgaggcctccaaagcccaccagtgtagcactggagaaagcacgtgtccactgtccgcgcacattgttcgcctggtatgccatgcaggctgggatattagcattggcaccggcaacagtgaagaacacgccgaagtagcggacggcatcgctcttagcgaagcccattaacggcaggccaattatcgcgagcaaggcgttgaaaatgagaatcggggcgcgcatgtggtacttgtcgccaacccaggccgtggcgtacatgacgattcctgcgaacccgtaaggcggcgcgacaaggcattgggcttggccgacgccgtatcccatcccggacatgaggattatgggcaggaaatatgcgatggcgtaagtgacggtagtgagacagctgggatgcggttagcagtaatcgggtctgcttgaaaagggaacgcacaagaagatcatggcaaacccccagatcttaagatccactgccggtttgaggaactttttgagagagaaggcctccatatcgccatcgtttctgtccttattgatgcgacggatgatgaatgcgcattccctctcgtttaggaagttccaggacttgtgtgcgcggtcggggaaatcgacgaggaagaaaaagcataggatgccaatacagccggtgatctatattttttgttagcttggttttttttttgggttgacccaactctccataccactccctcaaggatgaaaatccatctccagccggtcaggccttgctttccgttcaattgcatcagaccaaacgcaaggatacccgccaacgcagaagcaacacatccaatgagatagaaaacggagaatcgtttttggacgtcatctttgaagagtcagtactgtgcagtcgctcggagatattcctttcggccatttatcttacatcgggtataccagcaagacagcaagtagacgcagccaggaaagtaaccagcttccaacacacccaaaagcacacgcgttccaaccaacgcgccccagtcctggacgaatcccatcccctgcgtcggtcagcaacccaaagtcttgacgtcgagaaggcagaaatcccttacaatcatgatccccgcccagcatagaataatcgagcccaggaagtaagttgggccaacttttcgaatgatgacggtcatcggtggttggaagagaatatagggcacaaagaacatcaggacgacaatggactattcagaagttagcccttcgccctccgagaaatggaactcgtttgtttgaacatacatagcgctcccctatgtccaatcgcaattcctttttcaatctttccatgggtcagccatttttgaacacggtctcctcgatgattgtagtcttaccctgcaacggcggccatgctcaaattcgtccggtccacgagcgagatgcaataagctaatccagtcattgtcaccagacgcagatcaattctccgaataatcttcttctgctcctgcggtgtgaactcatcgtcatcgtcgctgggaaggctcttccccacgatgtcctcgatgcggtgatcagcaggtagtttctcatcgatgggagtcattgtccccatgctgattctgaattgaattgggatatttaatagaaagataagatgcaggggacagcaagaaaaaagaattcaattgtcttgggccagaaatagaagacaaatctgcggccttatcttacagaacgacaaggatcaagaatttatatatccaagtagaaacacaccgcacaataaaccaaccattcctaaaccagccattcaagatcgccgctcgcttattgcaacccgcttcaagctgcccaggaaattccccaagaaacaagacaatcgagatcgcaatagccgacagaaagtggccaagtgcctcgggacgagcacaattgtcgtatagcaagggaatacgccgcaatatcgtccgaaaaacaaatgagggggtaatcaccccactgtggacaaactgtacgagttatctcttacgcattgagctggttagcatcggtggcggctgctttgggagataatccgggggcgatggggaagaaatgcgggggaaggtacttggcaacttggcaaatggtgcgttgactacgtgatgcactttgatcccctctttcgtttggtgctttagtctgattgttgggcagagatgtcacttgtgggactcgagatgatctgttctgtatgtggtttgttgccaatgtttcttggttagggtttcttgacttttgattcacgtactttgtcattgttagcgggaaaatcaaccgggcccctcctgacttgtttctaaaatttcaagctgagtagggggatattccgaggctgatctcgtactcgtcggcgggtcaggaagtgccacctggttatgaggaaccttaatattccatctctcttgatacgtcgaagctcgaagaatccgaaagtataacttgccatgtagaaaagtatatataatcctggtcatgctagtatgatcctggtcttctgccggcagatagatagcgccgtgtatggtgatatcatcaccatgcatggataacctaggtatatccaagttctgtggcaagcggttggttcttaatacagcccactatagacgaatctgtcatttgacacacgtggtggatggatatccaccttataaagttgctataaagacacggagcctgattatagacggtggataaaaagtattgaccttactatcgtcaattaaattctttttttacacctcggttcgatcctaaaatgctaagctgattaaaggtagcttccatcatcctcgtattcgtcctcttcttcatcctcttctaaaaggagtctctcacgttcttcctcatccacccgacccttctccctcagctgcctcacagacacgaaaacaaagattacgagtgatgttccaacaatgaatcccgcgattgccaagacaacattgattggaattgggtttccatcaaacgtatgatgcgtcaatgcgtcgagcccgtactgagagaagtttgcgattccggagaggcaaataatggcaccgtacacacgcccaaatgtggcaaagccgaatacttttgtagtataatcactagaaccaaggattagtaagtagaatttggcagggggggaaaagcagcatacgacatggccgagtaatagagaggccggagcaagacaaacagcaaaacggtcatataaccagcccaaactgccgggatggagttcagtacaccaatgaccgtagtgaaaagcacaatcagccccagcatcgttggaacgctaaggcgatcaagcagaaagccgatcaccggcgtgaagagaacgcccccgaccggtagtgcgacgtcgaaaaaggcacctattttatttgcctcctcgatcgattcgagcatgtactcatactgcgagcgaatcgtggcaataaagtagttcatgcgaatcatttgcaaaacagtcatcagtgtaatcaggataaaccacggcgttgccatctgtttatgtgccggcaggccatgcaacacaccccacacccaactcgtctgctggcgatcttcttctcgttccgcacgcatctgcctttcatctctatcaccaagcaccgcatcgatctggcgaagctttttctttctccgctccgcccgacgtttcctcacccggtttagctccgacgtgctctcaatttcatcgtcggagtcgtggacgtcgcgtgtagcgtcttcggccttttctaacttgctctgcaagtttagagtcgagacataatcgcgcactggcatgatcgtcaccagcgcgatgaaaatacatacggggactatcagatagcccaaaaagaatttgtccggggtgaaggatctgcccgatttctcatagacgagccggtagaagaggaacacagcagcagaggcatcgaatgcaccagtcaccagcgcgacgatcgaacctgcatatttagggaacgcatttgcaatttggaacgaggggacaaataaaaaggtgccagccagagcgaggaagaagttccccgcgatgtagccatcgaagccgggttcatggaacgcaaaggccatgatgacagcgccgatggcaagaagcaggcaagcaatgaaccagcagatacgtgatccgcatcgatccaaaactgtcccaactggcagagcggagacatttgctgttatcgaagcaatagtgaagaacaggttgagtctagcatttgattagtggcaagcacatatccgggagtctgtgcaacactgtgcaacaagcatacccaaggtcctgctgtgcgcaaagctcaagcccttcaaccttttcagcaggagtgcaacgttcatggtaaacgccttcctcgacgaggacaggcttgagcgccgcgaagccaaaaacgattcccgacgcactccaacacgcgatcacggtgacagcaacctgggctgaaagttgttagctgtttgtcttacactgggctgaagaggacataccaattctctttgtggtggaatgtttgtacgctggtgttccagggcgcgtttctgcgaccgggatcgcgtcgctcggaggctggatgacatcgtagctgattttccggcgaatgggaacgaaatcgcagtcatcgactaggtctggttcaagttcgcgatcaataccgtcaatagcggaaacatgctgcaccagtgacattgctctgtgttgaacagacggggtgttgtgtggaggaaaagttggtttgatcggcaaaacttggttctttcccttttcctgacacctctgatttttgctctttacactcgaagcatactagctacattctcaagctcattacactgtggaaatatggttattgagacaaggtatgtagctgtttgtcagctctgattcgctcaggaatttgcctaaattgccactgtcgtcaatttcgtccaatcacaaaggatgtctaggtcaaattaaggtgagggcatccatggatcatcttgactttataattaaagtattatattcctacctcttacctcaggggctaacatctacataatatatactatactcacttaataatactccttctcaagcagccgtggcagcggatttctcctttttgattgacctccattccatcgtcagcgcggggacgatcatcagacaggacaccgccagggcgacaatgaacgaccgctggaggccatcattgtataacgccagaacctcgctcaacttggtagcagggacagcattcgacagacctgtcgccccagccgccataatcttggccacatcaatcccctgaatgtggggtaggtttgcaccgaggtaattctggaagagcgactgagcaacagcgataaagacagctccgccgagagactgcgcgaagaacatcagcgagacaccaatggcgacctcatccatagggagaatagtctgcgccgccatggagggctgctgcattcctgtgccgataccgatgccaaacaacacctggtatccaatccaggcggagtggttggtgtccaccttgaaggttgtcatcaaccctgcgcccgtcgacatgaacaccgccgcaataaacatccacgggacgtagtatcccgttgcggtgatgattgacccggagagtatggctccgacaacgagcgccagcaccatgggaattgtgtcgatgccggatttcacagctgatgtgccgcgcacgccttggaaccagagtgggagcgtgtacagcatagagattagtcctccaccgacacacagggaaaatactactccgctgatgatgctccgctggtttaatatgtgaggcggcactgttgcgtctttcttgagccggatctgcacaccgacaaaggcaatcatcagtgtccctgagatgacgaacagcgcgatgatgcgcccattgctccagggataggttataccgccccactgcagggcgagcaggaagcagatgacagagggcaggaatagcacactgcccaggggatcgaggcggaggatttgttgcttccaggtgcatggttggggcttgtgggggacggccaggaaaaggaacaagatgaccatggtgaaaccgccgatgggcaagttgatatagaagcaccaacgccatgtcacgttgtctgtgaacgcaccacccatcaaaggtccgatgattgaggaaataccaaaagtcgaccccatcagcccgacatacatgggccttttggccagcggcacgatctgtgcgattatcactgtcgcgccggaaaatatgccagctgatccaatcccggctatcgcacggccgacaatgaaggcatcagagttaggggcgccaccacagacggccgatccgacttcaaaaatgaggatcgcgatcaggaagatggtcttggtcgagtagaaggtgtacaccttgccccaagatagctgcgtggcgcaacttgtcagcagatatgcactcgcataccaactgaggtcgtctagggaattgaactggtttgcaatgcgaggaactgctgtagcaatgatggtgcgatcctatagtgttcaatgtcttgttagtatatatctacatgggcaatagagaatgcaacattcataccaaggcaaccaaaaacatagcgaacagaatagaaacaataatagctagcagccgggtccccgttggtaaatgagtctcatctttcttgacctccgagggcttctcggtggtagcttcctggtcgagctgcttttctatcgatcgaatcattgtataatacgacagtggttgaacttgaagcaagggtatctttgcaattgatctaaattaacaaatatgaatggaaaagggcagacttataaataattgattgtagttcatgatctcgggggggtgaagctgggttcggcgccgaataacatagtacgaaattcggttcggcgccgagctaagagtcttggctccttcttgcttgtagcttattctttcgccaatacaaccaacccttcatgctatccacacgctctttttcttctattaacaaaagtgtggcgtgacagtcatcgaaacatacaggaatgcaatgcatcgaaagagcttaagaactttcttctatttcattgtcgatatacctaataaagagtcactgccccgttaccacaactccaggaattcgtctgccactttagtgaggagtaagctctaaaaacctgtcactagcctagccaatgtcccattgatagactgatcgcttgccaatatctagtaagaagcataaagggtttgttcctgtctgacaccaagttgaatacaatctgattcgatcgcgatgatcgtcactcctgacaaatcgacgtgggggccgaactgacaagagctcgaggacttcgccacttgacttccccgcacagaagaacataggcgccccatttttatttctccttcggcggagtcctggtgcttgatggttgaatagtctctactagttgctcaacaacttcccgactgcaatcgtgaagctgacatgtccaactcaaaacccgaacgtggaagcaggggccgatatgctcgcttgctttgtcaaggctgcaggtccaggaaaatcaaatgtaatctgccagatataaacgagctgggtcctcttggctctccacaacccccggaaaagtcctgcgaacgttgccgcagcctcggtcttggatgcgttattgagcgttcgactttgggtcgtccatccttcaagcgcggtgaaaatgagtcaggtcggaagtcaaattctgcccactgtcattcagctacgcaaaatgaacaacctggcaactctctgatcaaggactactcgccctcggagtcgacgacgagtccagaaaccactcaagaaatacgtgcagtggctgacaagacggtgtttgagtctgtcattgaatttcaacacttttttgcctcggccttgggcaaagaccgaatatttggtgctacaattcctcggagtacttcaggctgcatgactcctctcccagagctggtgagccacgaaatagcgagcagtctcgacaaggagtaagcacctgccgttaccttgggatatcttgactgcttgtctaacatatgtcgtattttaagcctggcttggtataggttttttattcccggtctgccaagcttagtagacataagagaccgtctcaagggagacgacgaacttaatattggcaccaatttgctcttcgcattgctttgtctgatctcatgcgatacaacaggcaaatttgaccggcttcatccacgtttgaagtggaaccttcagctggctatttcatcctatgggcaagagtttatcttttcccctcccactcactgcgactctgttgttgtctgtattatcttggctgattacaggccaaccaccgtgggagtatctcaacatactgcacacagagcgatcaagtcgaccctatatctcaatatagctttcaaagtcgctgaaaaattagagatgctaccttcgcaactcaatctaagctttgcagatataccatccatgagtgatgaggaatttgaacatcgaattacagattctttgcaaggaatgaaaatcttcacccaggatatcattctagatggactattgtcaagaccagtccatcaactgcaagaagcgctggatcgcatggcaccccatatccacgtttatcaaaatgtcttcaggcatcgtccttgctcaccaaggattattttccagatacagtgggccacagcgagctatatgcttctagaatctttgaaagcaacaaaacagaactggaccaatccacaaagactatgtcatgttgtcgacgagactgaacaaaagtgtcttgaacagatcagattctgtgactgggcactgtcaaatacggctcagtcagggccgcccgaggaggtaagggctgctcgttctttgctggaatatcgattccatgcagtaataggacgatcatatggaattgcgcttcttcacatcatgatccttcggtccagagcctcaaacagcagcttctcaagtgattccgatataaatatccaggaagctagtcaaatgggcgccaaactctcggatgctatgagcaatacttctgatgatctcggcattcaaattgtgacattcatctcacgctttgggcgtcccttccccgatcggctactcgcagtgcttgaaatgttcatcaagggcacagatttaaaacttgatggcatacagtttcaagctccattccgggatatcgttctcgatatactcgccttttccagatccatcgtggagaataacagcatcaatgtcaagaacttaactggaaagatgagagaaaatgccgaccaccaagtcttggttcttgcagagtgtgctaaaagacttggtaacatggttgcctcgcctggaaaatcgattgaagctgcttttgctggcggttgcgtgtttgccgccannnnnnnnnnnnnnnnnnnnnnnnnnnnnnnnnnnnnnnnnnnnnnnnnnnnnnnnnnnnnnnnnnnnnnnnnnnnnnnnnnnnnnnnnnnnnnnnnnnnnnnnnnnnnnnnnnnnnnnnnnnnnnnnnnnnnnnnnnnnnnnnnnnnnnnnnnnnnnnnnnnnnnnnnnnnnnnnnnnnnnnnnnnnnnnnnnnnnnnnnnnnnnnnnnnnnnnnnnnnnnnnnnnngctgtttttgctggcggttgcgtgtttgccgccagcactaaagtcatgatggcattcattgatatcatgagagatctgaagaaagaaagcgatcttggaaaagctggcccggtgccgctaactgtgtctgatggctcagcagaagggccaagcatgagtacctttgaagataattccctagattcggggaatttgtggtctactgagccaataccaaattcttttagcgctgaagatttcgtttttgactggtccacgataatggattttgatgaaaatatgttgtacaatgacctgaattttgattttgcttcgtgttaaagcatttattggacaagatgtatataactctacgggtgcagaatataggggttgcctctaaagcaaagtgcatgaagagagcaagaagggaaagaagggaaaggaggaaaaacataatgacaatactcaacatagtagtacagatgattgttagttcgcttgacacaaaggtccaaacaatgcaccgcccgtcacctcttcccagccttcattgcccacgcatcgccagcaccaaaacacaccctctgggtcgtacttcttcttgatcgacagaagttggtcatatctatcgccgaaccagtccttcctccagtccggatcatacggatcggcctcattcagataagttcccgtcgcaggagccaaagctttcatggctgctaacttccttttagtgagttcctccttaactttttgaatttcctccgaacccgcatttgccggccacatatctattccttgtaacagaagataggctttcctccaagctggattcacagaggtatatggcacattgttgagaacttttccaccggcaacgatattcaggagcacagtgttgtttgcagtatgaaccccttctccgacctcggtggtcaaaatttgaagcaaatcatatagctgttgttctttgccggataaagaatctttggcgaagaatctcgatgccatgagtggttgattattacctgcggacgtgtggtgcgtcgacgcataccatgcggcccacgaaggatgagtagaccatttagatgataccaggtaatccgttccatttccaggaagcagatcatcaataatcactcggttcatcagatcttttgcgtgattgatcgcttcaattgaatcattcgcgaggaacttgatgaagggagcgctgtatacccaagattcatacttccgggtgaggaaagcagtaccggcgaacccttcatcaacaattgcaggatatttcgaggccattcgagccgtggcctgcaagactgcagaggtattgtggcccaaatccgcaatagtcaggtcatggtaaagggttggacgagtaggatacgtcttgatggtagctgatatgacaacaccatatgtacctccccctcctcctctgagggcagtaaagagatcggagttctgacatgcgttcgccgttacaagctctcctgacgcaaggacaactttgtattcaaggacttgatctgttgctagtccgaattcgtggctgagggaaccatgacctgctccctgaagaaatccgccaatgcatccgacggtcttgcgttgtgttagtgagattgcattgcttgagttttcattcaaactgatgtggacttacagggtcacctcctccaacaacgacatggcggtgtttagaggcgaaactgtagacatccttccacacatatccaccctggatagtgatcgcacttccagtccaattagatgggcagtttccttccgaataattgaatgtcttatgaaaatgaagcccgcctttgatatgctttatccagatcgacaaactgccgtatccttgcgatctatcatgattttcatcgtcagtcataagatacttatataaagattaaaagtccaccttaccgctgtgagatgtcatgcccagtattcttgataacgagtcgcacattgttctctttggcaaaccttatgccagcagcgacgtcatcggccttggtagccttgatggtatacgcgggagaagttcctagctcgcacaacggatacgcggctaccgaagcgttgattggggggcacgtatcaacgagtggatagctatatccgattggagattccgggatccagaattcatttgtccaatttgaagcaatgcgttgacattctttagcgctgtatccagggccgtgatagcatgctttggcgagaggctggttttgaagaagttttccttccaccgtagagttgagagaagtccatttcgaggctgatggccagcaatcgtctgctggtgtctatttcaacttggattagataatttgcagtatacagatccatcatcatagaataacatacgcatttgcatttagcaaagacggactgggctccagcaaggagaaagaggcttttgagaagcatgttcattggaatattcgttaaatgttttactgattactagcgagagaacgaccagccgtatttatatcaattatatattggttgctttacccttccgtgtgtggcttgaccttcaggcttcagttcacattgatgtaagcggaagcggaatcattgaatcaatgtaccgcaccagaattccatggacattgtggcagtgcttcgcaaattctcaatgcccaatactatgtcaacggaattacagcaaggcttatttcagtcgagtctcatatatcgcaaatttcatttgtaaactgagtgcgcaaatttatcgcgcaaatttattatccgatgaatgatcgtcgggtgttggcgccacctcgtcattcagatcagcgccctggccgcagacaaagtaacgcgatgactgcgatatgtgcgatatacagcgtcatttacgaagccagcctgataaaatgaggtttataccctatgcatacagttcacactttgtttctcggcctgtacccgagacaacactaggccatatatagctagctggaaattttaactacctataagtggccaataaattaccacttgtcctaatcaggactcgacttgtttcgtgtacgggccgataaagaaagcccgagtgtctatatttatcgagggatatcctgcattggtatacatatatacttcttgtgacgataggagtagtttagtgagttattggaagaaccctctctccggagaacgaagcagtccacgctttagataggaaggctatgcagtagctaagcatttatttccggacagaaaattccgctctgcagatacagaaatgcgcatgcacgcaacagagaaacttgaatgacgatcttcgcactcctgaccattattggctagcactggggcctacagactttggggattggggctaagcaatgcaaagtctggggctgaattaaggcccaaaaaatcaagacttttcagagggatcggcagtgcgccctagacatgtaagattttgagtaagattttgggtttacgggatagataaaaggtgggtgactcgggggtttccttttcttttcgcaatctatttcatttcgtcttttcacgaatccttatatctacttttgtcggctttagcgctcttcaaaatgggtcctttaaatccgagacaagcggccgctgggagctatggctgctctatacctgatcacattgaaaatggtgagcgataattgctacgcatggattaatacgccaactaacgttttgaatagttggtggcggaccatttgtgggaaatctctcattctaccacttcaacatgattgtttccggtgcctgcactatcatagtgctgttcttgactttcggtcttatgggacgccatgcgatgcgcatgagtaaccccgaagaacaaatcaagtaagtccaccagtaaggtcgagacagccttgcgatactaaaagcatatacaggatcatgcgaatcgtcaacatgattccctcctaccaagtcctgtccttcatctcgatctgcgttccaaactcctatatctatctacaaggcttcaccgaggtattccagggtattgctctatacgcctttctgatgttactctgcgagttcttggcccccacggaccggggtaaggtggaattcttctcttcgctcgagacgaagagacagtggcaaccaaagaagaagagaaacggtcttgcgttctttagtgtaagtaccctgaccattgaaacgcacactatcgaatgctgaccgaatcttccctttagttgacctggtggtctgtccttcaatatccaatcatcacctgtattacagctgtcgcacagctggtgacccagttgttgcacaggtactgcctttcaagcaaatcaccccacttcgctcatgtttgggtatggatttacccttccaatacgtccccatatacagtaaagagagactaacatagatgatagatcacagctgccacatctctgtcaacatcagtggccgtcaacgccatcattcaattctacatgaacatgaaggaacatatgaaagatcaccacccactcaccaagttgctggcattcaaactgattgtcggactggtcatattggaaaagatcatttttctcatcttggagagcgccaatgtccttcacaacaacgacacattgacctatgtcgacgtcatgataggtctaccagaaatgatcatctgcgtacagatggtcccgctatgcttgttggtcctttacgcttaccggacaaagccttacgaaatttccaacgcgtctcgcaccgtgatcctgcggcctcaagagtaccaggccatcgattccgatggcgacgaggaggtgttgacgagtggattccagaaacgctaccagggtggctggatgggactgcacgcatgggccgcttacttgaacccgctgggcttgctcatggatgtcatatccgctcatagaatgatctccaaagctcgggctctacaaagggcgcagatgaaggagcaagcccagaaggaggaggaaatgacaagatatgagaccggatatgatactgccgagggagcatgagttttcacattttattatcccagtgaagttacaggcgatctagactagattttatgcacgatgaatatgaatgcacatccgcgatgactactatctgaacttggtggttgtgaattgtgaattactgacagaaagcttgcattgacttctatttgtgcttggctaaagcattaggctttctcacaacagtagctgattaactatcagcttatttccgcataattgcgcgtggcggagccaaaagcacgacgatccaccgtactttagcgcaaggtggagagtttaggggcgaagctaagcccaaaaggggaatccagtagcgccaagactttttcaaaagagtggggcatcgcgatcggcagagcctctggcccggtccctcgtggcttccttccctatctttttgccctactcgtagcgtagatggtcacgtatggtactcgtgttgacatgcctttcctgaattatttgatcgttcctgtctcttcattgccatcttatcaatttagctactttcaacccccaaaactccatcaccatggttgaggtctacgggttctgcgacccaacctttcagtcgcaagtagctgctgggtcattccatcgggtatagcttcttagcagaggctacaaattttgtcacactttcctagactacatgacctcattgtgtagctcaactagtcgactgacgcgggattccactcattctctgacatctagagtgatatttccaaaatttcggttcaccttcgttgtagattgtggaatttgattcggcgcgcgcaattaattgcgcgctagctttagaagatggcgggggcggggttggtccataagcgcaactaattgcgctttacctcgtttacatatttaggagactgtttgcacatctattttctgtttgcatgagcttgatttcttccttttcgtcccaaagataaacctcttcttcaactcggattggccgacaccatggagcccttcaaagacaagataattcctggccctggagatctccccaacgtccgtgcagatgcccaacgcgttttccaggtcctcgagtcaggaggtgtggttattctaccgaccgaagtgggctacggactgatggccacttctgcggaggccattgaccgtgccttcgccgttcaccttcgttgtggattgtggaatttgattcggcgcgcgcaattaattgcgcgctagctttagaagatggcgggggcggggttggtccataagcgcaactaattgcgctttacctcgtttacatatttaggagactgtttgcacatctattttctgtttgcatgagcttgatttcttccttttcgtcccaaagataaacctcttcttcaactcggattggccgacaccatggagcccttcaaagacaagataattcctggccctggagatctccccaacgtccgtgcagatgcccaacgcgttttccaggtcctcgagtcaggaggtgtggttattctaccgaccgaagtgggctacggactgatggccacttctgcggaggccattgaccgtgccttcgccgcgaagcgacgccggccaggtcacgctcagggtctatatggcacacatgaattgcaccgggaacttcacatcctggacgaccagcggtttgaaatgacacgtgtgctagtcgaagacctagacatgagcttcatggctgttgggccatgccgcaacggtcatcatcttcttcgggctttatccccacaaaccctctctaaggtcacaaaggacggcactatcgctatgttcatcagctgcagttcacttctgagagagatttgcagactgaatgctacatcaggccagctcatggtaggctctagtgcaaacgtgtcaggtggtgggcagaaattccgtgtcgaagatattgaggatgaactcaaggaggcggcggatttgattgtcgattatggtctgcaacgctatcatgtatatggacgaccttctctcatcatggattttgaccagatgaagattttgcgaatggggtcatgttatgaactgttccgcgagcgcatgcggaagttttggggggtcgacttgcctgaggaccctgattatcgtgcttgagacttttgtttaaggcgaagccgaagactatggaagacattgttcattcctcgactagacttttgtatgcctttcctaaatgtcttcgcctacatttgataggtaccttgtacttcacaacctagttattatttagtctagctcatcctctctagtgcacattacaactcccaaatactcaaccaagcgctattaggtgatgaacaagcaaacagaataaacgaaataccaaaccaaagtcccaaatcaagtgtgactccccgaactttccgattccgaatcccactcgtcatcccctccagcactttcctcctttgcagcaatcacaatccacaagattttattggcctccttcgtcttcttcttttcctgcctctcctgtctccttgtagtcccccgatctcctctcctccctgacctccgatcttgcctagcctgatcctttatcatcttctcattctgcttctgttcggccttgctagcttcttttgcaccccatttcttccaaaatccatcaggcattgttggttccttaacattattgaaggaaagtgacataactcgatttcccaacaaactcatgcgctgcataatggggtggttgttactttcagaagcatcctggtactgctgacgaacgaagacattttcttgatcacccaagccaacatattcaagcatcttatccgtcttgcacatttggacatgcaaacccttgggatggaaaagctcctcgttcgccttggctaggtacttcttcgtgcgcactttggttgtaactgatgagctgaccccagctaccacgttgacactcacactgaccatctgcacaatcatggagggggccatgccgccgacattggcggcgttgttggcggcttgaagggctgggttcgctaggaacgcttcgtttagttcatcgatgaaaacgataagttcatcggacgagatttggtgctctagttctggtacgcggacgcgagcgaatgggctcatgttctcgccgttgaatcttctatgacttatctctgggtaagtgatacattggttagatttggccactaattcacggataggctttatactaacgaggtataacacagggccgagatacgcttggaagctggggtgggagctgaagtagctgtgttggggggtagggttgactttgctgggctactaattcgttgccagcatagagttcactcggcggaagtgcaggtggttgctgtctcgcatactgggcttctaacacgttgccagcgtagagttcgctcggcggttgctgtctcgcatactgggcttctaattcgttgggagcgtagagttcgctcggcggttgctgtcgcacatactgggcttctaattcgttgggagcgtagagttcactcggcggttgctgtctcacatactgggcttctagttcgttgccagcgtagagttcactcggcggttgctgccgcacatacaactcgttgggagcgtagagttcgctcggtggaagtgtaggtggctgctgacccacatactgctgtggcgggccgtacatttgcctgggattgtatgattcttgcggccactgcggctgtggcgcgccatgctgctgagtttggctgtattgttgttgctggggatgtccgtactggtcttgccctggactgtactgttcgggtggataaccctgccttcgttcacggtatcgagatcggccacccgattgtgcgtgtcgagggtcttgtgcaggagctctttttcgggcctctctcctggctctgagcatgacttaatgcttttgaagaaagaattcggatgaaagtgcgttagctaatgttcaacaataattcaaattgatttgtagatgacgttgaaaagaaaaaaaagccccctccaacatgtcatgccgtgggttcctccttattaacaaataacactataataccacagtatccgcaactcaaaacttccccaaagaatagaaccttcgaccaatgacctgcgccaaaacacgaaatcgcgcatcccactctgcgcagtaacccaaaaggaaggcttatttccgcataaatgcgcgtggcggagtcaaaacacgacgatctcaccgcacttccctacctgcattggctagcgtaaagcggacagctttgggggctaaaatgtgaagcatagcctggaatctggtgtggccaagaattttagctgaaggagagtagctaattgcgtcgctccgcaattaaatcataacctcgtgtgtgtatgtcacatgaccgttctttttcctatgtacaggctccgaaatcattagaaatcaacgcggtgaaggattagtcggccaactctggcagaataatccaatcggcagaataaatatagactaggcccaatctagctagactgttaatatatagtcacgtgggcctctcgggcatgtcccaatggtccctacacttacgtagcattagaagtaagagtcagtcgttttgctctgcaacgatatctgggcggccgcaggctatccagattactagtatgtcatattccagggctgaccgtcgattttggaatcaataaaccttctcgttagaataaattaatgcccgaggtccaaggcagaatcaggcagaatcaggcagcagggagtggtcatatccaaaggggggggtggctgtatcaatgccccaagaacaatggtactccgtagccacttacaatggcattaacggttccatgggtcataaagaggaacaaggcacacgtaaataacaacaaacaccggccttccttatttgaggagcaaaaaagaacatcaccttcatctgcagcgtttgagctcatataagatatctgaataaggtcagatgaaagaaagaaaaaagaaatacaacttctcaaattattctatgctgtagatgccaagagttaatatataaatgccatgttccagtcgtcgacggatgacggatatgacgtatggaggcatgtgccaatgacgtagccctagcgacccatctacaggttatatgtcaactatgtgccatggctgaccacttttcatgaggaattttgcatagtccttggactgactcgtttgtccttgctatttgagacgggaacaatctgcaagaagccgaattgccggaacaatcaaacacttcatccgttcgaaacccacaaataaaagcatggccaacatatcgattagtgcccctggcctgagcagcggcgggtttctttacaacaatggcaacaataatgcgcgactatgcatcacagccgaaaccgaagatttcgatatcgagatcatcaagaactggcaggaggaaggattcgacgtcctatacctcccttataacggcggaggaaaagactacgctcgtcggttgcagtctgtaaaggacggactcggtgtaggcgaaaactacgccgtggttggtatgcacagaacttctctgaacatataaactccgagtgacaaactgaccaacccgattcctagcctacggcgacgctgcggactactgtctcgggtactatatcaattccattaacgccagtcgactctgcgccctggtcgcgtattaccccagtctaatccctgatacgcgatctcggttcccactctcactccaggtcctcgtgcacttggcgggcaagactgtggacgtacttgttcagcctgtcgcacttggtttgcaagggaagaaacgccgccagacacggccgatcaacgctggtatcgggactggagagcgtttggatttagggtacccggcgtttacgtatgataatgccgtgcccggatttgcggaaacagatctggaggaatacgatcgtctgtcggcggagctagcttggtcgcggactttgaaggtcctgcggaaggggtattccagggatccggattacgagcagcggtatgagcaacatgtggaaggtaagtttaaatcgcaaaaccgttgagccatggcggactaatactttgttagccaagtttttctcgtcgaacgtcaagaaaaccatggatggttacgttcaacacaaaacccctagtgtcacctacacgccgacaatcagcggcggcatcgggaaaaaatccttgcgccatttctatgaacattacttcatcggcaaattgcccccgtccatgcgcctgcgactgctatctcgtaccacaggatccgaccgcatcgtagatgagctgtacgtcagctacgagcacacacaggaggttccatggatgctaccgggcgtcccggcgacaaacaagcgagtcgagatcatcctcgtgagcattgtcagtttgcgcggggggcgtctttactccgagcacgtgtactgggaccaagccagcgtgctcgtccaagttggtcttttggacccaaagctgctgccaaacggagtccagggtgtcgaccgactgcccgttgttgggcgcgaagctgcccgtcgcatcctccatgaggatacggagcttgaacaggaagattaccataacaagatgatccgtcgtgcacgtgcccgcgcgagaaggagcttgaatcagagctcccgcctgtcccaggctggcgatgagtctgccgctgacctgaagagtgaggcggagcagtcattgcctgacaggagtcgggataagggcaagtcggttcagaaaaccaagcctgcaagtctgcagcgagcggccatggaagcggctgagcacgggggtgatgatgacgctaatacggagacggagactagtgtcaaggctaggtctgaggctgacaatcaggctgcctatgtcgaggatggggaaaatgatagtgctgagaatgggtctaagcagacatgacttctcactactacttccctttgtcatgataaccacgaagacattaccatagccttttctctgcctccagagattgaaggattttgttgggaatgttcttccgattttttaagcgactgtattttgattatcagtgatgttgtacatgtcgatctcttctgtttagcattaatgattatcactactgtggatgcgacgatgaatatgatttgtatgtttgaacagatattgcaacaattgagttgaaaattgaagctctgagataatgaagtacagcgccatcgaaggcaccaaagaaaccattatatatagtgtagcatactatcattagcaatcaatctgacttctgttgatcactccttttctcttagtcacatagtcagatacgcgtaactagttatcatatggaatatatatacacggattcatcgcggatactccaaaggaaatcatggacaaaaacaaagcctagttataagcatcgagtcatccccgaaaaatgttccaagtggctcaaagacatatttcacccaatatcacctcggctctagttaaatgatacggttcctgccattcacagttccagttcggtcgcatgtcctcgctggctttcgaaggtgcagaggagccagggttcaaatttaatgaatttcgggtagaatccatcatatcaccatggcatgagaagcataatatgagagaatgcgaaacataatggcacctgaaggtattaaatgacacaaaggaatacgtgacgagactttacaaggcataaaagacaaaaaggttgatgcgaatagagtttaccaagttcatcggacaaagtggggcaaagtgggacttagagatagggaccccatcattatggcctagtggtaaaatacgctgtattctttcctacctgtacgtcaagatattgtttttgtacgtgtacctaaatacaccaactggaaggtgatagatgagaagaagttcagggttaagattagaaactaagcaatagttagccaattgactaactcccgtttttctcaagttcaaatagacaaaaccacgtaaggcagggtctcatcaacgatccgtgggtgcaacttaaaaatataacctccacaggcaagtgtcccattcaactactgattatcgatttgatgatgccgaaaattgctgacctctcgccgacaacggtgttaccgataccaatcaatcttccccgcgccttaaagccagcaacgagtcatgaacaaaatcaacggatctgtttttcagaagccaaaagcacaagacgataagggtctaaaagagtaagcaaagtctttgttggttagatttctgggtgtcctaaggacgttcgttcaactgcttaccttcatcttgtaaaatgagacgagggatatggagtcatccactcacacattgtagaaggcagcgttgatatacttcaaacaggccctaaaacaaggactaatcaaaaatccttgttctgatttatgggcgtactggcctcgtgtttagaaacttactattgcgacattttgtctaccgagacgcctgatgtctagagccaaatataccgaatgaaggaataactaaattccctcgacacctcaatgctgacctttaatccagaaggcagttcaacatcgatatagatatatagaggcctcaaattgaaaagagggtatgagagctgcaggtcaggcttactaattcgaagcagcgcgttgatggcctgcatatgggggtaatcggtataatacgtatggaagaaggccatgagttgtaagaaagaaataatatttgctcttggtcggacatatctactctgaaagtttcgatagaacctttgctgtattagtatgttcatgaaactagttatagccagatacagatggacctgggctcccagaaactagtaatcgcgtgctctcaattctaacattacctacaatccatccattagtataactttaataaagggaagattggagggaaatcaccaagttccaagagggtgttttaaaattcagagggttagtcgattaggccctgcggtataagctctagagggcaggcgggatgctctacattcttctttttgacacatcgtgacttctcctaagtcctgctttttattctctctttaagaagagtcagtaacaatacattcgacaagtggaagatataatttatgttattttgctgagcgaaacgaagcaaactattatagtcgttcaggcaagggaatatactaggcctgatttttgagatttacgtaatagaagtagcagtcctaacggatcaaacattacaaaaaggactattcttcctcaaattttctgatctaatacacagacacttttcagaccaaacttcttctcatcatccgataaacacaaagcttctagcacggacaaggcctctgccgcaaggtatttgttctcccaggtcttttgaaaacagaataaccaacaagatcagatcacgtcaacatgtgcaagagaacctacagtagaaggaagcgggcttatgaaaattatcataacatacctggccatctggtctctgatggatgcaacacctacggggtagagactggcagaaactatagtattctcggtggtaccacgcaggttccttgcgattactgcaaggccaaaggcctttaggcccaaacagccgatagtaagtggtacgaggtcgcactaggtgggcctctgccatgatctacttttaagtatccttgtcagttctccttgtgatgcttcaaaatttcttataatctgaagacccttctagaattccttggcaaccttgaccgttcgtgaatattgcatagcgaagtatcgacaattcatgacctatgtagtagtgatgagctactacatgctgagttgggataacgcggcagtcattctttctgattgttcttgtgccgttattgagtttgtgttgttcttttggaaggtccgtgcccgcctcataagtgaggttggcgcggggatctactctattatctaccacgtcgcgccaaccattgtggtgaaaattggtgaaaactgttcatgccgacctgacccccgaagaaaaggaaaccctagaggaggacattttgatcaagaaatcgcgttcttcaagggtcttgataagcttcaagatcgatgtccagatattgttatatgctttctcatgctccctgactatctttttctaccatattgcacgcatgggccactcttcgctcgcttttttcactaccaggagcgggagccaacaataaatcactgggtagggcgagttatcagggtcaaggagtacgaggatcctgctctcgtcgctcggtagatataacaactcacctccgctcttgagtatgtagagaaaataggcttctatcacaatgttctacattcaggcaactgtcttctagacagtaacttgaacttaaaactaactgattttagctgtactaccactattagacaactgcttaaaaatttacatactccgtaggccataaaaatacttgctagaccgttgaaaggcacatacagtctttattctaccagaactgaacagtttacagtcgggaaacttctatacctcatataatatggttataaaccatattataacattgacaacagggaatgggttaacagtagagggtctgaccgatttaggaatatagagtttccagaacttaatcgcaatcaagttcttaataggcttatttctacttattggctcaatatctatcctacaatagccttcgtagcgtactactttaagcgcaagacaaaggatatggtattgagtctagaatacatccccattgactctgcaaaggagacaaaggcctatgaagcattgattcgcaaaggcttgctgggacctgagttagctctccgcttccagtcggcctagagaatatacctacatgcttttgtacagagaagtatgtttatttggcaatcttttctacaaagaaggttctggatctggtcctggtgattggttgctgatactttcaggcatactttgaggctttgactgtcctcatgcaattgaaagacttctctttgttcccttttgtagtgtttaggcctaccttcgtcttcatgaatatggcagtaattagtccgtcatcatcgattaatctgacttctgttgattttattctgcaagtattgttcattacgttgatcgcgggcttgctaacttactaagatatcagccagtgatgttattgccaaccacagagattcttcactgtactataagataactacgaatacgaccatgatatcactagtatttttgaacgtcttaagaaagagtttttcgtaatccaaaaatcaatgtcaaatgccaagacgctagccctatccagacccacataataacgttaagctaaagaaaaccttccacggtaccttttccgttttaaggttaaaagtttgtttcaggttcatttctcatgccacacttctaatatcgaccatctccttgtgactcgtctgagagtcaatatcacgtgtagccgatcggggagtcaccaatgtcttcggagagaagatgttgaaggtgaccatagtcaagaacatcagagcagcatcaaagacatacaagtacacctctgtcgacatgatcggaccatttgtacccgtaatatactcaatggcacggaagatagaccgaatcatgataaacagactagccgtgtatagcacaaacaaacacttcatccacggcaccgtggtggcggatgtagaagtcccatcacgggctttccaaagccggtaatggaacacaccagcagtcacgacgaagaatccgaagaacgcaatttggataaaaagaccggcaatgatgatgtcttgtcctagagcaagcttagactgggtctttgcggaagagaggaagccgccgccagcacactgagcgaggaaggagacaacgtctccacagacaaatattttggtcagccagttgactcggataagagagagcttttcatgtccggtggagataattgagcggcccaggaccatgtagatggatgcggcgaagaaggctggtgcgagaaggagcaagagtgattgcatgatatatgggggtgttgtccaattggggctttctcgcgagttaagatagcgaccgaggtagccgatagcttcaactataagtaagttagctttatatctccgttctcgaataagatatatactgacagattcctccgataatgaaaggaatgaagaaccatgatcgactccgtatcatttgaaaaatgtgcaccagggtggtcaatccgaagagaacaacaaagataattgctgcaactcccgatgggttatagttgtagagagtgtaggtggattcgttggccattgctatggtttgaattgagtaaaggagaagacgtaattgaaaagtaagaatcgaatctaaaagcaatgttgactatgaagatgtattgattgccggccggacgctttcatatttatataacaattgcattgctgtgaattttctgcgagatctagtgctgagcccgaaaatctattctgggttcagatttgggttggaatccgagaagatttagacagccttgtttctagaagcttattgtgggtgtatatcatgattgtggcttgggacgaagttatatattctaggctgccgattaattttgctccctacttcgtcactcttgtagacatgtcaatctcgaaactgtttgaagatcaaagatccgaacccgaaagtccgaataagagtaaatctcggtctcttattggttgtaggaagcctcgtattcgtaactttatctctcgtattcgggtccgtgttattatgtagcctggccatctgcaggtgttgttcgatgaaaaagataaacttaagattactcaagatctatatcccaagtttaacatgtcaattgttctgcctgaacaagaaatagccctgttcaactcatgtggatcatattgagatgatccaaaacgttgatccaaaaacgagcccgtgtgatcatcatggagaacaccaaaaagaattagtctcaccgtggaccggagtgaaactaccctggtcatgcgtaccatggaagcagaaaactgaaggattgcaaaactacaagaaaggaccgccccctgcgattttctgagaagcatcaatcacagatttgattctgacagtcaaaatgcagcttctccttccctttgtcgggctatccctttcgggtcttgcatatgccaattcgagcagcgcgagcgcctcggcgactgtaacgggcttcctctccacttcttctggtactcttcaggtccccaagggagcttcatgtgcttgcgagaagctttctcggtctatgccgaaaagcataatcctccccggtgcgacaaactacacgactcagacagtcgataattactgggatattcgcgcgaatctttctcctgcgtgtgtcttcgtgcccaatactgctgctgaagtgtcgcaagcggtcaaaatcatcggtgcctgtgatgcgcagtttgctgttcgtggcggaggccacatgaacgtaagcttctatcgaatagaaactatgaaataatactaactctctactctacaacagtatcctggagcgaacaacatcgatgcgggagttctgattgctttatcgaatctgaactcgatcactgtgaagagtaacaccgtggaggttggccctggactcaattggtacgaggtggactcagcacttgagcctcatggccgtgtctgcatcggtggccgtatgaagaccattggtgttcccggactcagtcttatcggtggcttccactacttcaacaacaagtacggctacgccatggacaatgtggtcacatacgatatcgttcttggaaatggaactcagattactgtcaacaagactttgcacagcgatctcttctgggccttgaagggtggtgcaaacaactttggaatcgtgactcggttcgagttgaagacttacgatattcctaagatcagcacaactattcaagttttcaacgagacacacattcccgactatatctctgctgtctgcgaggcggctaagctggacgatgaagatcccattgcggcaggcatgatcgccactatcacctacaatgcgaccaccaaggtggcacagggctctgtcctcggtgttcaggagggtgtcagcagccccccatctcaattcgccaactttaccaaaattccagcaacccaaagaattaacaatgtcactactataaagccatgggttgaggtccttgactcccctaagcagatgatgcggtatgtaatctcgcctgtattgcaattttcactttactgattacttagtgtccaattctctcacaagacgatgaaacccgacgcggaggttctttattcgatttacaaggcttggaaagccgcagtcgacaagatcgccgatgtccagggtctttacccgacttttgtcatgaatgtcatttccccgacttcagtccgcgtggccaagaccaacggtgttggtaacgtttggggtctcgaagaagaacctcttattagtaagtccttccaaacttagttcggttgcgcttcttaggcttaccattactgtacagtttggcaactcagtaccggctgggacttagcccaggatgatattcgcatggaagcttgggcacgtcaattagttgagcaccttcacggtatcaacaaagagctaggtcttgcttctgagttcatctacatgggtgatgctggtgagtggcaagatccttatgcgggtttccccagtgagaacgtcgctcgcatgagaaagatcaggtcttcttatgatcctgcaggagttttctccatccttagctggggtggtttcaaattgggtctgtaattaaacctaagttgtcagcttttggtagatctggcgatacgtccccttaagtgacattcatatttatcgtgtttatagaatctctatagaatcaacccacttcgtaaccatgagatcttggttttttgatgacatagtcgcgacgtcaacagcgagggagttaaactactagcatcaacaatatatcaagcgaggctgtcagagccgataaaattctcgcggaatgatcaccggccaacctcatacattattgtcaccaattatttttgacctgtcatctatctggacagaacgcacgaataatgtggcagtatttatagcttccaagcatttccaagcctttctagaggcgaacagccgttcaatggaatgtatagggagtgcccacataccacacgcgatcctagatcaacatcatatggacccttcgggaatggaatgtgcgatcagacaaccgattgagtgaacatgggattttttgacacttgccagcccctgagtatgacgcagaagttgcattcgaattttagatacgtttcatgttcagcatcatagccattcttccccgccatcccattatcgcggtacaatcgtataagaagaatttgatagggcgcactaggtatataagagcagtagatgcgcatcttgctgtctacgctttgcaatcacacagttcaatttgatcatcaaactataacttcactgacattgaatcttagcaaccatgcattccctcgccacctcattcatctccttatccctactatcaggcgcagtccatgcccaaagcatcgctcgtgtctggacacacttctacccaaactgccctggcgagacattcagcaagctggacacatacgaagactaccaagaatccggcccatcccaagatatcaccttggacagctgcaaaagcttccctgtcccctcctacgagcacaatctcgtcagcgctatctctgttgacgccgagctcctcacccacaaccacgacctccccttcctagaaggcggcagcggctgcaacatcagcgtgcacgaggtcccaggctgcatcgacccgcccctaatcaacaaagagatccgaaatggcgtcgaagtcagccattgtgtgccgcgccagttagtcgcttatagccaggtctgggtgaattttgtctgcggcagcgatagccctctccacaacgagaacattccccagacgacagaagagaacaagcaagcagacaccaagcagtccatgcctactgctgcgcccgatgcgcctgtgcgtactgagaaacatacttccgtcgaggatatcaataatatccagacgcctgggtcgaactcggattcgtggcgtacgtcccaggttgtgaataaccagcgcgagccggcgcaggagagccgtgttaatatggccggtcatgcgcagagtgagcagatcgttcatcagatgttggagttgttgaagaacaggacttcgcatatcgtcactggcaagcatcatgctactcacttgaatgttacactgcatcacaatggcactaccccaggaaaccacactgtgatgtcacgtcggcgtctatctgttttgcgagatcgggctggtcgttttgtttgaatttgttttgggacgtctgtctgagcgtttgatttatgtttgatgaattgcaatcatgtgtgtataccgatcaattaaaagtctactgtgtatgtgaaaattgcgcaattccctaacccataatactacataatagtggacatagagaatggatgcgatattcttactcagaactcaactcaaagtagtgtaaaacaaaagcttcaataggtatggccgaagcaaagagtctacaggattgtatatcatttctggtctactgaccaaacgaagtgatattttgtgtcaatggtagacacacatcagactttacaacagcaagaccttttacggtcattccgacatgggtttagcaaatttaccaacgcgtagtcatgatcccaagttaatattctaacttgtctcttcgtcggtatctgtagccgcctgcttccgactggcagcctccttaccagcaaagctgaacaacatgcccagatcatagatcactttcaagcatccagcaataatgaaggatacaccgaaatggccattgcgcgacaagatacccgtcaacaggggacccatgctctgcgcggtagtcttcacaacattcaccgcgcccatgatagcagtgcgatttttcgccggcagagccgcggcaaggaatgcggagcgaggcgccacatccatattctgggagcaggctcgcagaaccaagaaggtcagtgccagaggcaggctagatgggacggagatgagagccaggcagattgccgacggcaaatgagtgaataccatggtcttccaaatgttagaagtcgctcagctttcccgagtgaagaatatcttacttttacattaccaattcgtttggcgagggacgaggcaatcagcatggatgctgcggagatgatgtttgtggtgaagaagatagtgccgagttcaccttcaggcagattaaacttgcccctgaagaagtaggtcatccaggagctgagaaattagcatcgtagccgacaagagttgggattacactcacagtgaagctaatccagatgcgaacgagtccactccaaataggatgaagagacggataaccagcgaccacaggtccttctcgatagacgggaacagccacttcttcctcgtggccggctcgatatcccgcccgactgcttctaccagcagcggttgggtttcagagatctgctcctgcggctcttctttctggacctcgaccttttcacttaagcccaaagtgaagattaacttaacgacgccaacgccggcatagacgaagaaaatgatgcgacaggcgggaatgaattcccatccgtggattgactccagagaattgatgatccaaccacagacaagcattcccatggccgagccagcagttccaatcaaggaataccaagcaaagacatcactcaaaagctcatgaggtgtgagatgagccaaagtggattcctccacggcgcggaacggaccgatttcatttccactaagaaattagctgagataaaaatagaaagagaaaaaagggtcgaaccttggactaatgacacccaagactgcagcggccagtagaacccagaaattcccgaacagcgcgaaaatgactccgctaccagccatgagaattgatccgagcgacaacaccgccttgcgacccatagcatcagcatacagagtgaggaagaagctaatcacaacatctccgatcagcgtgagcgtcataaacaagccaatgcgatcatccgaaattcccatggccgacagatacgatgccagaatcaaggtcgagccgccatacgcgaagaggcgcacgaagcgttgggcgcagagaagcttcacgtcgagcgatgaccgccacatagtggttaggcccagctcttcgaggacatggcccatgtaacgcgccggtcgcgattgattctccattgtttgatggttgaaggaagaaagttgaaacaaccacgttttaactccgaatctcggactcggcgttcctgccggagctaagctttcttaggagagagagcctaaaagggctgaagaaatatattaactcttttgaatataaacaaaattattatgtacaaaggatattctcaatcactgctcagtcttgggaggccatttcactcgtcgttccgcccgcacatacaagttggtaggacggatcaactggaacatgggatcatactcgactgccccatcattctctttcgtgaacttgtaccggtataacaacttgggcaagaacactttgacttcctgtaaggcaaagttgaacccaatgcacatgcgcggtccggcagcgaaggggatatacgcagtcttatgacggttcttgacctccgctgtatcccaacgatccgggtcaaaccgtgctgggttagaccagactgctggattgttgtgtatgtggtgaagggcggggatgatgatggattcttcggagagcttgtatccgcctgggagaatcatgtcgactttggctgtgcgcgcaggctggtatgaggggttatgacggcgctgggtttctttgatgaacttgtccaagaatgccagacggtccgtcagatctgcggtcattggggtatcggcgtcgatgtcgttgtcaatcaattcctgtaggagtctctcctgcatgccgggatagctgactaccgaataaagcagccacgatagcaatgagctggtagttgtgaaaccagcgcccgtggctaccactagggcctccatcagactggtcttaggcaatttctcgcccttgttatcggttgcgcgaataatataatctgcctaggcgttagctcaagccttgcaacttctagtcattcaacttaccaatcatgttggaggcctgcaatgcagcatcctgcaacgggagatcttcgatgccattacgagaggcattttgaatagactcgttgaccatctcaataatacgatagcgagcgtcccgtagacgttgcgggtcaccgaaaggcaacttggcgtaccaatcaccacgggcggtcaccttcttgttcagctccaaagactcagcaattcggtagaccagttcgtggggtggtgcatccacggcagagaaatgcttgaagtccataccgagaaccagctttcccacggcctgcgcaccgagcttgagcatatatgggtagacgttccaagcctcgccgcgctcgtctagctcgtcgaacacattgaatgagtcctcgacggttgcttgcatagtgggagcgtagtgacgcactgctttcggacccagggctggcgggaggaacttgtgtgctgcacgccattcaggtgtatcggtgtcacccaaaaacacaccggcctgttggttcttgatcgggtacaaagggtgtgcctcgttgatttttttggtgaagaaatcagattctgcaaaaacaattgcggatagcgcggggtcattggtgtggtagactgtccggcccatgttggtggtttgaatgataggtccatattgttcgaatagacgctggtggtttcccaagtgatcggggtaaatctcgaagaagtttcccacgaatggcagtcccttgggaccgggaatctcccgtactgccttaccatctattgagatggcgatgggcccttcgttggtaaggatctcagagggggtggacaagatcgaatcctctgactgaaatccgatgcctaacttgagagttaggatgataccagaggcgacgcgataaatgcttaccacttggctcaacgatggcaaattgaccagcaataaggtgctgaagttcttcgtagtcgactgttgtctctacctcgattgggcgagctgaggtgatagcctcgcccaacaagtggaaatttttggcaaccatcgtgaaatgggaatgagaataataacgtgttctttctctctggaagggccctcctcacatttataaggatcttattatctgggccatttgaaactgcatagttgactccactattcatgaaagcgcatcccgactcattttcatgtcataatgaagcagatgcatatctctgcgagcctcggttcaaaatatttctcaaattaggatccacagtatcatcagattgcaaaaataggagaatacaacatagcgcggacgttatttcggactcgctgtgccgatggcactggcgcgaaatgtgccgtctcaaacggccccaccgtcaagatagaggttttttttaattatttttcttcaagatgccgaggcattttcaatccctccttgctggtaggctcgttttatgcaaataccggaagtgctaagtgggctattgtgataattccatgttccagtacggagtcctcgtcgtgatattaaattaagactccgtcctttttggtttttgcaaaatcattcattcacaatgtccgttccagaaacaaaagagctcaaggtcgagctgccagagtatacattgaaagatgtggcagcacataacaccaagggtgatacctggatggtgatccacggacaaggtaacttccccttaaataatcaaaaagacggtgctaacattacgacagtctttgacctcacaaaatatctgcatgatcacccaggtggtccagaggttctcctcgaggtagccggtactgatgccacagcagactatgaggatgttgggcattctgaagacgcccgcgagatcatgcagcccttcctggtgggcactttgaaggatgctcatcagtacgtccagcctaagacagtgcgtgtggtctcccaaaaagcacctgaagtggccaattcctcatcgtcgaccatcaaaacgatcgctttcactttgggtggactggccccagtcttttacctcatcagccaaagaaacaatctcacaaagagcctgggagccatctcccacttgatccctcacccactgaagaacctacgactacctcacgggggcttcatcaacggcttcttggccgcttctgctatctccacagtcctgggtgtaatggtagcgcgacaggccagcagattcaccaagatcgactccgggttcatgcggttcccacctcataagaagtcaaagaaggtgcttcgtgtcgatccgcacctggcacgcggcttcctcgacccgcaacattatcaacgcctgcatctcgttgaaaagaccgaactagcaacgaatgtctaccgtttcgtctttgccctgccaaccgccacaggtattttgggtctacccattggccaacacgtctccatcagagccgttgtcgacggagcgagtattactcgctcatacacccctacctctaacaacctcgaccggggccgcattgaactcgtgatcaaatgctatcccgacggtttattgagcgggaagtatctggccggcttgactgtcggcgaagaagtcgaattccgcgggcccaagggctctatgcgttatacgcaaggtctttgtcgcaagatcggcatggtggccggcggcacaggcatcacacccatgttccagcttatccgggcgatttgcgagaatgacaccgacacgacggaggttagtctggtttatgcgaaccgcagcgagtctgacattctcttgcgcgaagagcttgaacgcttcgcgcgccaatacccgaagaacttcaagctgtggtatatgctagactctgcgcccgagggctggacctatggatcgggatacgtggaccaggcagttctggcaaagcagctccctgcgccttcgccggacactaaggtgatgctatgtgggccgcccggaatggtcaatgccactaagaagaatttggttgcgttgggctttacaaagccaggggtggtggggaagatgaccgatcaaatattttgtttctagaaaattgcctaatatagtaatagccgaggtttatagagaattgagtcaagtgttaaattattgatcacaacttacgacccgtccgacggccctgttgccgaatgcgttcgggtgtccgaagagggcaggtctccgagagatcgccgaaactccactcgccgaagtgctgattcccgagacgttgactggctgaatggttgaagcttatcttccaggaaacactccataatactagtataaattatgtacacaagactatgttctccctcccttcacttcgtatcatctgtcttcgttcctttgcgtttgcttcgacgccggtgagatctccggcgcttcttccttggtttctgtttctcccgttctcgaatcatgaagcgaacccttcggcctaatcttccttctcttgtctcgaacccagtcttcaagttcatttctgttgagattctcacaagaggtgagatgttcaacttggtatttttcgagcctgagtatcgaggaagatcagacgatatagtaaccgtcttctttttcttcgacagttgatcgtcagtaggaggatctggaggtgtagggtcttccgtatcaggtagaactttggcggttcgctttgtcgatgcccgggactgcaaacgacatagataaagatagtataagagcagtagaaagactgtagcgccgaggatagaccccgctattgcacctttgctttcatctgacagtccattgcttttggtcgagtttatttgctcgggcgcaggagttgctgctatattgaccacctcgatgacagtcgtgaatggagtggtcaccgtcaatgtcaccaggttcgacgttggccatgacttggtgttccccagagtaatgactgacacgaaagtggtgtctgcttcgattactgtctgggtgacctcgcgaatcgcaggcgccattgcccggcaacaaattgaactgacatgatgggtttaagtgtcagtgacagcatcacttatttcgcgccacaaacacgtagggtatgcacgagcgggtcaaaacggtcttctagtatatgtgataacgaaatcgaattcgtgataatcgtatcttctgactcagttatgcagcttgtgctgcgcagtcacggaaatatcactgcaattggtggaatggtctgcaagtgtggttggaaggccagctcactgcgtcttggcgcaggaattctgctgagcacggaattaagacgaacacctgcgtggggttttcccaactaatacttacagtttatttgccaagtgctgaacacccacgggttctcgtcagacagacatgcagctttacctcgaatcaatttcctgcccgaaaagaacgagcgcagtgtatggtcgcctcgcccgcacggacgaattctctccatactccacacagagaggccttggctcttcaactttgaactcatattattgaagttacgtgatataaagcctctatagatttacagcttcgcgcttccaggagcaaagttcgatccagcgccctggctaatagcatcaacgatggcatcgacactatccaaaatccacgtattcccctcatcgctagccaaccagcgcgcagcctcttccccctcgacatcagtcgcccacgagccatcctcgatcgccttgcgcaacccaaacaagtgcgaggtgacttggggtgcaacgccagactgagcgcgcaagcacgagacagcaacaacagacgtcaggatccgcccaacggacgcgccagtgctacgctcaggatcagacaacagggcgccgtagttgttgtacaggatgtgcaccggcagatcggggtgtgagtcagctagtttattgaatagcttcttctcgaatggccgatagatggaattccagagcgcaaggccgcgctcgctgatcgcggtgatattctccggggtggggatgcgggtgggggtgcgggagagctggctggtgactgaatctggaaggctggctttcaaggcgttgaggcagtttatggtgcgtgggataccgttgaaactaatgcattttagaccgacctcgcgcatgagctcggccgtctcgacttgcttgttcgggttggtgctggctagttcgtagagggctgcgagggactcaggggagttcatggttatcgttgctgcagtctggcatttgttagattgcgttcaatcttaattgaatgaatcgactcactgatagtgcgacccatgatggctgcgagagctgtttggattgtgcggtctgttggatcttttggtagaccgaggttatgtttgctggcgcaggaatggtggatggccgggcagcaggggccttgattaatgccttgaggctaggtgaaagtttagacatttcggatgatgagctcttgtgctctgaatgtggatgtcttgccattaaatacaggatttgctaaagaccaattgtgttcccgacctcgggagcttcgggaacggaacccagaagtgagcaccgataaataccgggagggtggtaataagacagtaaattacttaaacatttcggtaatattacaggtggggaacacgtcgaaatccggggaatacggggaaacaaaacatccagacgcgatcttatggaagctctgtcattggtgaggatctgcgggctggtgaggaggtcggactcagaaatgcccaccgaagtgtctctctctgactgtttctgggctatttctttccattattttcctattttctccccatcctacgctgcggacagtacaggagaataatatcattcgtactccaagcaacaatccaagtcgccatggaccaacccaagtccacagtatcagagctggaagaggcgaagtcaggtcccctcgaccgacattacgaccttgaacatcaacagaagttgacacggagggtattgtggaagttggatatacagtcagttcaagcattacaattaccatgcgcttgctaaattttccagtattcttcctatcctagccctgcttttcctcatgtcatttttagacaggaccaatgtcggtaatgcgaagattctcggcttggaagcggacctttctatcacagaccatcagtatgatatcggcctggctgtgttctatctcacctatatttgcaggtgcgttgtgttctgttggacccccacgtcagaggctaattgatataaagcgaactgccgagtaatctagtactcaaaaaagcatcgccgaagatttggctgccgttcctgacggctatttggggtatcattaccatgtgcctaggatttgtacagaattttgctggttttgtcgtcgttcgggctttgctgggtatcgcggagggaggtcttctccctggcatggtatgtttccaatgttgaatgaaattgacatagttaactaacaaaaggaaaggttttatatctatcttctttctatcgacgaggcgatttggctctgcggatcggcttgttctacacagctgcttccctgtcgggcgcatttggaggtaaatattcatcaatctcactggttttcggcgatagtaacgaactaggacttctcgctcgtggactagccgaaatcggtcctcgaggaggcatacaaggttggcgctggattttgattatcgagggacttttggtatgtgaaggtaattgctatcaaaaacaaaatgctgtctgactgttgattagacgtttgtctccggggtgtcgagtttcttcgttcttccaaatagcttggaatctgcatcttttttaactgcagaggaaaaggaattcggaggtaaaaggctaatgcttgataatcccgggtcactagaagggtaagcttttctgacccgttggatgggaaagcttggctaacctaaacagatcctcggaggcagaatcgttcagatggtccgaagtccgtcgaggtgtgctagatctacaagtgtggctctctgcctcggcgtactttgccattctctctgggctatactcctttggcttgtttgtatgacttccctatttttacatcggcctcaagcactgacggttttagctgccaacaattatcaaaaacctcggttttgccaaagatgccaacgaggttcagttgtggtctgtgataccttatgctgtcgcagccgtaattacaggtttgtctacagagcacctttgaatttcatcaaatactcacacagtttttcagtcgttgtcgccatcatctctgatcgtctccgtctgcgaggcgtggtgatgctcttcaccctcccaatcgccatcattggatatgcagccatcgccaacattaactcccctcgcgttcaatacggcatgaccttcctcatggcaactggccaatacgctagtgtgccgtgcatcttggtgtggttgtcgaacaactctgcgggacattacaaaagagccactacatcggcgctgcagctggcaattgcaaatgctggaggattcgtttcgagtaagttgcccacactgaatttatttctagatcactgacatcactatagctttcaactatccatctagagatggacccctcttccaccgtggacataccattatccttggtttgttggtgtttgcatggtttatgtgggtgtatttatcattattgggtcaagggcgatcgctgatttacataggatcctgtttaatgtgctctactgtgcaaagatcaatcgagacaaaaggcagggtaagtatgatcaatacgcagggtataatgatgatcgtaacccggagttcatgatggttctatgatggcaatgttgtctatagacatattgatgtgctctacaatatactgattctggttctgggtaattgtagcaagcttaatttttagaattcaacgcattattctgcataaatcatctcatacccaccactgccaccagtgatgaggcttccagtcctgcttagttgcaccacgcaaatcatctgtatttaacacgtccacaccctcatgcacaagtacattccaaacatgattccgcagtccaatgggccaggtgggagttccccagtaccgcaccttcagtcccaacttgtgagcttcaaatacttggctccgaagaatagcaagctggatatctgacagacgactaagagaaagaggcccgataaccttgcggaagtctgctgatgcataatagctgttggatgggttataggtagagtccattggtttgttgtcgtttgccgttatctcggtgggaaaggtcaagttgccaagaggtgcatcaaagaagacgtcgcggtaggttgtgttctccaacagtaggtgaaaaggcacatctccactggcaacgatagtaactgggccgtatacgatatcagagccattgaagtgagtcagatagcccttttcacgaaacgggttcagctgctcaacaagaagcggcaaggtgcgatcaccatcggttttgcaatcaaccagcaaggtcacagtctgctttgggtcattaggaaacaccccgactatttcctgattcatgacgtgcggccagcttcgggaaggcggtgcattgtgtgtgtcgagtatcttcaacagcgggtcaagatagaggctctgtagtgtgccccggtggactgtggaacgtgaatggccgactagaatgtcatttccccatggccagacgtcagcctcgacgctgatacagcctgcacgaagtgctgagcgtaggggaatgtggcgccagtaatcgttgtgcgagtggcatggtacagggatgacaccgttggtagaccagtcggaaaaccttgagtggcgttccccggggaaaatagccaacgaggtgtcatgtcgaaagagataaaaaacccattgccatgcaacgatgaagagattgatgataccgctgcagtgagacattgttagcaccaacaagcacaacgagtcaggtgtggggaacacaatccaacggccaacaaatcacgacggggtgtagacttgggcagcaggtacgcacaagacgaaaatcagtgcccagagaggtcgctgcactacgcgacagaaaatggctctcttagagcgtggatatgcaatgcattctgggtgcgagcatttcaaaatcgagaaagagggtcgtctgggcttcatgtagggcgatgtatttctcacttcgagatcgactaagataaatgcttcatgctccggaataggctctagagcagatggatcaaaggccatgttgggagggaaagaaaaaggacaagctttttccaagggctgggcaccggctaagcttattttatgaggcttatcgggtccaccccaaaatacgtctgcctaattatggtgggattgtataacttcgaaattaagcgaaggaataaatgaaggatgtacaggctatttataggagacacgagaaaagaacgctctttgtctcatatcatgctcggtgtcggagtgactttattccatgatctcaagtgtatcggcaacggtgaacttggcatccgtcttgctttgtacttcttccacctcaacacccggagcaagctccgtcagtgtgagttctccggtggcccggttcacctggaagacacactgtacttttgtcagttttggttggcaatcaatcagggtcgtcgcacttaccaggtttgtaatgatggtgctaacaaccttggcaccagtcaacggcagagtgcacttttgtacaatcttagacgttccatctttagcgacatggctcgtggcaaccacgatcttggtcttgtccgggttcgagatcaaatccattgctcctcccatacccttgaatatcttgccgggaatcatatagttggccaggtcgccattggcactcacttgcagcgcaccaagaatagacacatctacatggcctccgcgaatcatgccgaaggactcggcgctgtcgaatgtggcggctccaggaaccaaggtaacggtctctttaccggcattgataatatcgctggtctgagttagggaaagttcaggtcatcacatctgggaacaacttacggatccagtgtttcctccgtgggataatcaccctgaatattgttagaacggcctacgtaaaaaagacgtagaaactcaccattcccaagataccattctccgactggatccagaccttcacgtcctttggcaagaacgatggtgccaacgtgggaataccaacgcccagattcacgtagaatcccggtttaagctccttagccgcccgacgagcaatcagttctctctgaagctgagccgcacttttagtaggcccagctacagagggctcctggcgcaacttcttgttttcaatgtgcttgtcgtccgtggcaggaacgatccgatccacgtagatacccggtaggtccacgtcattagcatcaatagcgccaactgggacgatgttctcggcctccacaatagtcaatgttgcggctttggccatgatagggccaaatgctttggtagtatatctaatcaatgttagtatccaattctaggacacagactggtacataaacttaccggaacacgcagttaccagcctcgtccaccttccaggctctgagaatagctacatctccggtcaaggcttcttccatgagatatgtcttgccgttgaactctcgggtctcgcgcgccttgccagactccagaactttaccagactcatccatgcgaacggggatttttccctcctgaataaaagtgtcttctcttatcagcgacgaatatcaagaaacataagagaagctatacatacgggctccagtcggggtatagaaagccggaatgccagcacccccagcacgaagacgttcagccaaagtaccctgtggacagagctcaatagccgtgtgtcccgtcaagtacttcttctccaacgccttattgttcccgaggtatgaaaggatcagacggttgatctggccattcttcgagagtatcgaaaggcctcccgccgcggaaccggcattgttagaaatggccgtcagggagtgcaattgatcagcaccccgacggtgcatagcattgatgatggtttctacactgcatatcagcttcgtagttctcacgcaggttatttattcatccacataccagcgactccgcaaagaccgaacccagagctaaggatcgtcgatccactcttgatatcggcaacggcggcatcggcatctttgtatagctttgagcggctgcgatcgatcttaggtgcgagagttgctgatggtgtggttagggagtatctagtggtgctggtactgaatggctgcagggggcgcacgctggcgcggacaccaatgaacagtcgcggtcgacacgcagtgagcgctttacgcgacaaagtagtagatatcctaagagccgacatagcttgtgattgtttagatctaaagaaagaagaaagaaggcaaaaatgaaatcatcgcgttgttatatcatcgacggcattggtcggggctacttctagatgccgagcgcctccgaaggttccccgtgtgtattatctatgacgtcatgggtatccactaaacatcaatatcaacagacccttaatcggcccactacttcttgaacagcctcagcttcccctaaatacccgcacgttgccgacattactctgctctgtcaaagaacccgcattggaaaccattgtagagatgggcgcgacatggccttcctcaggcctctcaggtttagacttaagctcttttgattcgtttgtgaggtttgcgcgtttcaactgtaatgtttatgccaattgatcacagtagggattgtgtataaaaaatcgtatggttgaagatgtgactccttcatacttgtgagagaggacgatgatgttggccaaaatggccctcaaggatgatatgctaaacgaaagggtatcaagatatatattgaagccgataataagaatacgttcagaaaaccaatgtctgatcagatcaaggcaagagaaactactgaagattgaaatccgcattggcagagtcgagccaatcccaattaagcatatcatcaagaggcacatccgggatcgacgcaccaaacgccgtgcccgcccgattgactgcatcgacgatctgatcatcagacatagcagagaattgcaaaggctcgaaccagaggtcctcaggtattgccactggcagcggacgatcatccagacatgcagactgaaatgcctcggatggatggacttcacctagatttcctcgggattggagagggaaggctggtgcgcgccggatcaactcacgcaagaacctcccgtacagcacggaggcgccgcttcggtgacttggtgttgcgccgattctctctaggacgccggctgtctcttcgatgaggtttcggacgcttggtgctagactggatttgctgtcgccgggtgttacgctgagactgagggcggagcaggcggcgaaggagatcattatgacggtgttgtttggcattgatttcaggcgagattcgccctggatggctgctcgtaggacgttcagtgcagatgatagaccggcggctcggaagaaacgtttcacttcgattggagctgttcggtggttgatgacaccaccgtatgtggataattgagtatgcgtgacaagaatctcgacgtaggggggtagagagcgtgcttgaatggttaataatgagtcaatcaatgtctggtatatgcttactgtctccttccccaattgacaaggcccatgttgcataccaccgctcgtagaaagtttgaatggttttcttgatcctgtgatatggtcagtatataaatgatattcatcaagacataatatcatacgactgagcagcctccgagccggtatcaacgatgcgataattatcacagcttgatttaacattctggaatagtccatcctgaaatcgttagaatggaattaatagcctgatacgggcatctctgatggattttgagactcgggagggcacctacaaggtcccttcgaagaactgccacggaactcataggaccgtcacgcgggtctgcaatgttggaaaggtgccaacgatcgcagttttcgatgagcgttgttgaagggaccgtatagcttcggccacgcgcaagacaaacactgaacaagttagtgtcagactcaaatgcaccactaggggaaaacgtaccctctctcaacgacatacaacgcaatccaagctctttcccgtcttcgcaacagcctaacgccccattccgaggacgggtcaatatcatgaaatccatccatgtgtaaagccctcttagcgtcgatgcactctgctcgcgccaggcgattcataagttcttggtcaaagcttgaagatggcgagataatcttgttcaaagataagtcaagagcaacagtgagggccatggcaatataggagcaagtatcatcgtctcctagtctatcgcctggagacatccatggaacgttcaccatgaaagccagaacaatctcaacagatttatagcgttgtgtgatcactcgcttcgcaagccatttgcaatgccttgataacctcttagataaagcagacgcagacggcaaaaatagggctgcgcctgccattatcgaagtaaatagaaaagccgactgggaccgcacaaaggatggggtatgtatcaagggatcgaggccccatcgagtatgtgcgagatgttgatagaagcttggtttgtcagttatcatttagatatgtttaacaataaagaccagactacttacaacgagaataaggactccgactcatcaaatgtgaccaagcccaacccaataggatccatatcaggtccaacatctagattcgctcccgcgggaacaaaaaaggatttggcggcctgttctccctgggaagtgttctgatataatgacgggccctctgacaacggcagtggagatactggcgcacgccgcgtcccaactggcgaaatctgaagatttgaagctctagcaagcagctgcagaggattttccgcatcatccagagtaagaccatcttccgcttgaatatcacgcggagacgtcatgcgcgggcgatctgatgtctctgaaaagcgacgctcatgctcatgctcattttgcattaactggccccgggcttgaccaaggagatcctggaggaccgaaatggctctttgggcctcatcgtcactagcagagtcgaccttcggccgcttaattgcctgttcgatctgatgtatcgctttctccaggccttttcgtttgctaagctccagtcagtattatattatactccacaaccttacgtgactcgactcacttttttacccccttttgtcgacccagatgatggttgggcacaatacactccgcattggtttgcttacatttcccgcagctggactcgcctgcctggcggttgcagcggatcttgctccgtcggcagtttaagcatgcggcttgttttccatgttggctagaggttggacctgccgactcgagctccatgaataagtgttttgactgaagtcatggacactaagggagatgcgggaagtcggggacaattagcgatcagtggttttggctcatgtagcgtaatagggctgcctattccctatatgacagtgtcatatacagttatgcttctcaacgggctgcaggatgcgctaagaccgccacctgcatgtctatattctaccaaagaccttgtttccgtccatggagcactgtttcgctgctctcttcaacagcccggccgggctagctcaatcggtagagcgtaagactcttaatcttaaggctgcgggttcgacccccgcgttcggctattcctaaaaccaaacctgagatttcttttttgctcttttctttttggaatttgttgatggaagagcacattgatcggatcaattgatctttttaatttggtgcgaatcattttcgcttttagctgctcactgcgtagtgtacaacggtgactatatatgtctacaacgttatgtctttcccaattcaattatatgtatatctatagtgacatttatcgatattcactgggtcattaggcgagttatggctcgagatgatatcctgatttctgcaatggctatgtatgaatgtcataacaagtgggtggtatcaattaaagattagtagctaaatataagctcgaaaacaagaccgttggtatttccatgacttaaaacgacagtgcatatagatccgaatcaacataacaaacgatcacatatcatccaaatgaagcctagtgaacgggaccagcctccacatcatggcccggaagagcaccagaagcctccggagcagcatgaggctgagctggagcctgagccatctccggaccagcagcgggcgcaacttccgtcgacgcagctcgcgacggcgcactagtaccggggggagtaacatccaacaaccgcggacccgactcatcaggcctcttgctcgccttgaccgttgcaggagccggacccaagacagtcgggtacttgaagcggaaaccccaagcgaagaacaagcgcatcttcgtccagaaactcatagcatcccacctcttcttaaggatcacggcatcctctttgctgcgggcgcggtagcccttccggaaacaaaacagacagaaaagggaaagcgggagcagaatgaaagaccagaaaagagggaagccccggcgggtctgccagcccgtcatgagacgacggaagcgcacccaggcgcgcacccaggcctcgatcatgcccaagatgaagacgatgccgatccagcccagtgcgcagatcaggacgattgcgaggtaggagatgccgatgccggatccccatgtgctggtgaaccagttgtagtcgtcgtagtcgtagtcgtagtagccagatgatccgccgctgtagccggtggttcctggtccgctggacaggccggtgtagtatccggagttgccgctgtagtcgctgctgtcggtgtactggcatttgctacctatgtatcgcgaggtaggggcattgtaggagctcagagagctcagggttgggctggggatctgggtgggttccacgaatactatttcgtagatgtaggtggtggtctggaatggctgggcgctgtcgactgaggtcgaggttattacattgtccctgggtagcaaggcggcgatctcatagggcggggtgacggcggcagcggtcgtgatggtccattgggtggagcaggctgtcggggctgagaatgtcaggttgacctggtagatggtgctgtgatagtttccgtcactatccacggtgtcgtagccggcgtcgaaaccaagcgccgtgccatagccggtgggatacagcttttcgacaacggtgtagtcataaatggtatcagtggaggtaatggtggacagggcctcagctggcaaagttgcagttggagtgatttcatggacctcagtgaccacctcggaatagtaatctgtagtaacgtcttgctcgtagacctccgtcacaatccaaggggcagcctgaacgcaactcaaaacgaatgacaagaaaagaataaacgagtgtgaaggcgccatcttgagtggtcctggggctttgcagggaaaacagtcacaaacgagggatccatggctttaataaaaaaaaaacgttaatagcgcctctgaaagaccctgaattttctggtcatttgggggcgctgttgtcgcctaagctatactggttgaaagcctcgggtggaaattgccagctttagagtaggcagatgccccgatgtgattggcgatgttcctcaattgccagagcgaagtggaggttctagtctgtttacgctctagtccctggaccctagccttttcgcctcacggactggtctttttttggacttttgtcccaaggttagcatggaaagcacacaaaatcggactagcccatgcatgaaaaaaaaaatcttcgttgaatacaaacagcgcagaaaatacaagcgtaacttcgtggatcgtcagtgttgcaaagtccagagatcgcgaggaaatctatataggggattgacagtcccgtaaatccggaggtacccaggaggaaaaagaaagcagaactgatttgctcaattagcagcccgtaaagcccgtagcctggcacccaaaccatcctcggcctcggcatccacctgcttaggctccttaacctcctccttaggcgcagcatccgcctcgaggttcaagcgcatatcaacacccgcatcatcagccagctgttccataagtcgatccacatcggcctcgccctccgcaccgtattcctgcatcgatataccctgtgcgacatcctcgatcgcactactcgcgatcttgaagtcctccgaccgggcgaggaagttgttagcgtgcgagacgaggtgttcgaggttgacgctccgcgaggcggcgtctaggccccgcgacgccatagcgagcgtgcgggatgtgtcgcgcgtgctctgggcggccttgagttcattgatgatgacatcggcgcgtgcggcttcggatttgagcgttacttggcgtcgcttctcgcgcacggcggaggcggcgtggatgcgggcgatctggaactcgcggtttttcatcgccttgtcggctttggccttttcggatttgaaggtcgcctcggcccggacggcttctttctttagtcggttggagtgtagctggggaagattagttggtttcatgcatgggcggggtcatgcacggtgtgaggggaacagaggaggcaacttaccttgacatttgtgcgggcttcgaagatagggtctttgcgaaccatgatgtcggttatagataatatagaggatgaggataggtgttgtggaaggcagatggatttgggggcgcgtggcaacgtcactgaccgcattcagtgtattcttagcgtcggaggtcgagtattcttagcgcaagcctcctagactgattaaatcaaggctactttcccgattgaggataattactatctacgttcgaaagattgcaagatgagccagtcgattttgcattataaaaactattatacaggccaaaaatggaaccctcagcgctgtttgcccatgagcaaagacgaaagagctttgctcgcgctggaactccgaaaactccgtgtacctcgatgcatctttccattactgcgttgccgactaaatttcattgtgtttccccgctgctgccgtttagacaggctgagactatcgattgcccaggccatggttaataacgactcccaactcggtcgagcctcggaggcgccagccgaccaggtctgtcgggagaaagtctcactaaccgctagctgcaatgctctgcccgtcgcatctcgaagcggacgcgccaaggctgggctgcaagctagtagtctggtgagaagtctcatccgaaagaccggtcggttggacaccttcgaggacgacagactcggggtcgaaatcaaccatagaatcaaagggaaatgctgatagatctccgccgtcgagaacgtcaaaggcgaacccgtcttcagggaaagaaggatttggctcagcgggtgaatcaccgtggaacaggcggcggaagtcatcgtcagaaagaggagctgcaacatcatgtgcagtttgaggttcggagaggtcgaagaggggaagggcgcttccaggtccttcgaggccagcgacggacactgcaggtcacacaacaccgctgcaggatgttgtgtcacgtcggaggcctcagccagagtggaaggtgtgaaggtgggggagtagtcggtgacggatggagtggggaaaggaatccgttccatagggagttcgtcgccttcttgtttgaagagggtaggcgtgagggtaggagattcgatggccggggagctggctttgggagtcacgctgcgagatccacggacctcggcggagagcttagccacttgttggctcaagcggttgttctccgactccatctgcgatagacgctggatcaagaactggttctgttgctccatgcggatcttttcggtctccagcttctccatttcgaggcgcttgcgctcgcgagatgtttgagcagcagcacggtttcgaaggacccgttctatccgacgctgctccttctcatcatctgttttggcgcgttttctaaagagtcagttgggttcacatttacgcaggggtggacaacatacctgggagggagattggttttgggggttgggagttcttgtccccaagactttctcttctttgttggcttcttctcatcatcttcttccttaatgtcatcttccggctccggagagtctaatgatgtatccgcgggagaaactgtgtacatctcgggacatggggaggttgggagggtatccattgggttgatagtatccgccatggtgacagagtcaaatggataaccggtgccggacgtgaataataattgcagtacagagtagacagacgtatagtgacttgggtgaaaagaggaagttcagatcacaaaggccacgttattatcacgatcggcaccggagaccagactccgggaatagggttgagtcagagggtgagtcagcaaagagagaggaaagaatggaaaggacagctgttcaactgcaaacggaggggagcgatgaggtttaagtagaggccagcgtggtctgaaagggatgggctgggggcgatggcaacaaagggggggggaaccttggaacctggccaacacacgtatgtaggtacaagcgacaccatacattttcgcatgtgcgcccaagtacctccaaaggggcggagtttctgtgacgagacacgtaaattacgttcatttccccctgcattccatggttcggccccggacgacagccaatcatgatgtgccgtgttgaaacattgcgtttacggaactccgtatggagaacccgacggggcctccgtacacttggtgacttcaatgctgtctatctcacttctatatttgggttgcatacacttgctacggagtaatattgatgtactccgtattatgtacttcggattcatctcctgtcgggtaatacaacacacatccagtccctccgactcgatctatctgaatcatgatacgtctgtcccacaatactccgtacgaatgatcccatatcacacagtctcgaacaatctagggtggacctatggatacgctctcctgaatctgaagacgcgatcaggattgccggagaatgccccatccccacgccaatcacaggtctttcgcagatcaaggctgtccccgccccgttaattctccgtcccccctgattgagaatgtgactctatgattatgtaaatccatggataaggggccaatgccatctagattggcggaaatcagcaggcggatgctacggaacaatctggaacacggcagaacgtctacaaggtatgtcgagggctgaaacgggcatacactgcccctccgttactatttagggttggcctcggaagtcagttataggggtaaccgtggaacctgaccatttgcaaactgaaaagataacgatatattctaaatactccgtacactaaattcagtgatcggtgttgtcatcccattttggaaaccttcgacaccaggggaattatatgcagtccctcaaacaaaaaaacgccatcccatagaaacgtgctcatgacaatatcgtaagcgaacatgtgcccgggtaaagtatctacatggacatatccatcgtgtcgtcgccggcatcgagagcattctgcgcatctgggtcggggaccaccacaccacgtccgcggccagcaagcagttcacgtcgcacttcaggtccaatgtccttgtgtccacggacgagaagcaaatcgagaagcgcttcacgctggtcctcggtgatgtcgttacgataacgctgtgcaaagaccagaagggactggtgccagagaacgggcagccggtatgccttggaaccgacctcattcatggcatcggccgaaggatcgagggcgcggaagcgcatgaagtggaagaccagcgcgtcaatgaccttgtacggcagggcgtacttcttctctaggaagacgcggatgaacatgttgacagcaccggtgctttcaatggaagtcaacgactgttccgcggccagatcacacatgcggagcagggcggcggccgagtgtagcacgggaaccgagacgcgggcaatcacagaagagacaatgtgggcttcacgcagggtgcaagtgccggtggacacgagcgggaacagaagtcccttgaagaagcatgcgggcttgtacagggccttgcgcagcgcattgtaggtgtggatgttcaatttcttggtttcgtggatttcttcgcgcacgcgctccaaaagcacagtgttgataaactcctgggcaactgcaggcttggacgaaatgaaaatacgggttacagcgtagacggcgttaccggtccatgactctgggcgggtgatatccagaagggtctgccagttcggtacagaaggaaggatcttgatgggcttggggagcgggccagacttgtagcgagaaagaatcataccaaccctagaacaagttagcttggcctcacaaggaatgatcacaaaacatacttctcatatacttccacggccttggcaggaatctggactgcatcctcggggacaccaccaccttggatgtattgaccatagggaccctcgccagcctgctttgcctcgtgctcggcaatcttctcgagaatcaaatcggcgagattagtggggccagcggagctgggatccttggggtgaaatatagggtcctcctcgtggggcatgaatctgttgaacatatctagatcattgggatcgacctcctagtaagatgttagaagctatagtactattcaaggtttcggaagtcttacaacttgctcgacatcgtcatcgacccaatcgtcggcctcaaacttcccctcgtcgtcggagaaaggctcttcctcgtcctcgaaccgggtatcgaattcgaatgcactcgactggggccgtgctgagttcttgagttgttcggcagcatcttcatcggccaattcctgtccaatctgtagaatcttgcgcgacatcttcgcatcgacaaagcgctgtccattttcgccatcctcgtcgttttcgtcggctttgcctttgcctttgcctttcttgctgctctgtgtccgaaggtgccccgcggaagtaatatcttcagcaagagggttgtgtctgcgtgccgctgccgcggcacgggagctcgatacctttggcatggctggtaattcttcagataaaccaaaaacttaaaatgagtattttgggctggcttatcgaagtacacacgacgatcaaattgtgtggtcatatttttttttctgccaggcggtgccccccaatctcctctccgcctgtaccccacaccgcctgagcctctacattttctgcaattaatcactgaccgccctagtttcccaaggagattattgtctggtgcgcatgcgcttgactgtttttgtacacaaagagaagcttgctgtctatcaatgaatataggagtcatcagaatactataggacttcaatctgggaagctacagattaccaactcccttgatctttcggatatatacgccgaaacagtttaacagcatacggacaagcttccggttgagtaaggacctcttagctttgcgaagcaaacgccgtggagccatcctcattgattatagctggtcaaattgctgactctccccagaccgacagaccacaacccaagcggacaaacatagcctccgtcatggcatccggccaagccccagggtcttccgctccgtcgtccaacatcaactccccgattctaccccccaatggcggacccctgcttaatgcgcaatttaccgacctgaatccacgatcatctccagccccatccgcccaaggcgatggtcgagccaagcgcaacaagcgagacagccgcaagaaacgtgaagccaaaggattagaccccgagaacgcacctccaccaaaaaggcgagccacagccgcacccagtacagccttgcccagctcaaaactgagcattcttcgtccattgctgctcgccgagccgcacgactcggatcggtaccctccacagcctcgccagttgaatcgcgtgagccgaaagacatcgaacgttttgggtcagagctgggatttctacgaggttgtcgataaacttaccaacaagaatgggtttcgttatagctacgccattgcagaccccggattccctcatatcaaatatcgacagacggatgttcacccgtaccatacccgcttcagtttcgaggattcaccggctgccatatttttttctgagaacgcgactgcggtgaccaccagtgatgcgtggcatactgcccgcgctaatgtatgtgctcgagagggcacgtattactacgaagctcgtgtgattagtggcatagtcaatgatccccaggcacctcagaacggcagaccgacaacttcaccgcgtggccatgtccgtattggattcgcccgacgtgaggccgatcttgacgtgaatgttggggtggattgctacgggtatgggattcgagatgtgaacggcgaagttgtcaatcgcatgcgatgcgagttcttcttccccaagggggaggccatcaatgaaggcgatgttatcggcatgctcattactcttccacctctttctctccacaagaagattgtcgagggcacttacgatcccaccaataataccccatcaccgccgatggcaaccaacatcatccgagatcggattccttttcactacaaatcggatttctgttggcagcaatctaacgtcttctctacaaaacacctccgtgactatgctttcaacctcaaagaaacaccgacgttcggtcccccgtcccctctgaacagcgaagacgccacgctccgcaccctcccagggtccagtatcaccattctaaagaacggagtacaaatgggcactcccttcaaagaactttacgccttcctaccgcccgcaagccgtctcgccaacggcacaaacaatctcggtattggcgagcgcgagaatgccgacgacggcctgatcgggtattatcccgctgttagttgctacggcggcggtgccgtcgaatgccgattcgaggggccgtggtgggttggtccacccaagcagactgaaactggagagcccgtccgtgctatgggcgaacgcttcaatgatcaaatcgccgaggacgtgatggccgatatcgtggacgaggtagaagccatgttcacgtggggcggcattgatggcgatgtcatcaagaacaacaccgagctcgacggcgctggggttgtgggaggggcggaggtgttgaagggtggtgttggtgcggcgcttgactctgcacttgcccatacccccggaactgccggggcatctgattccgctgctaatagcaatcgtgagacgccggctgcaggcgatgttgggagtcatggccttgaagatgcgatgagtgtcgggacagctggcactcctaatgttgaagtgcagggtgatggtgatggcgatgtcgagatgacttagtgacgcactaaatgggaaaatggattaggcgtttggcttttgcaatagcattgataccaattctgatttcaaaatctattcacataatatacatttcatatagtagtcgtacagcgctgggcttaatctaacttccttccctccaacaactctccgactttcatgaccaactgatcgtctccgtattgaccgatgacttggattcctgctagttcggtatcattctgcccagaaacagtcacggggactgaaattgcaggtagaccagccagactggcgggaacggtgaatacgtcgctgacatatgcatccaaaggtgacttcttgatagatttgctcatcaaatccgacagtcgtggaggggatgagggcgcagtcggacatacgatgacatctacgtcaatttcacctgcgattttatttgcatcctgtgcagcgagcggatgcttggctgtaaagaccgcatcaaagtcttgctggactagacgacgcaactgttgtgctttgatgaagtagttatcaatggcatcagcactcaaagtgaatgtgcctaggagaattcgtctcttcacttcttccccgaatccctctcctcgagtctttgagaaaagacatccatcaggctttccgtcaccatctgggccttcggcacgagtcccgtatcgtactccgtcgtatttggccaggtttgaagatgcctcggcaggtcctacgacataatacgtggataatgcgtgttttgtggcgggtagggagacggaatggagggtgtgcccttggcttttcaggtgtgctagagaaagagcccacgcccgtcgaaccgaggaagtcagctcggaaacgttatactctattggcacgccgattcggagaggggctgaagtcaagcgcgaggcaagctgtggtgtttgaagagaggcctggattcgagagcgggagtgtattgagaggctggtagggtcgcactggtcatgttggttgaggatgtctaggcatggtattagcagtcgttttccagtcacactggtcaaacccaccgaagatatctcgcacattggcggttgttttccccaatatacccacggtatctagagaattggcgtatgccaccactccccatcgtgagatcagtccgtatgacggtttaaatcccactatcccggtataagcagctggaagtctgaccgagcctccggtatccgttcctagtgagctgtaaaagtcagcaatcagtctgcttgctgattactagccacttacgcatagcattcgtcgccggcaactgaagcggcacttccaccagagctgccgccggccgataggtcctccccgctggagtcctgacgagggttcctgacaggaccgaaatgtgaattgatcgagtgtgatcccatcccaaactcgtccatatttgtctttccagctacaatggccccggcggcctctaattgatcgacaacggtggcattgaacgggctcacatattcatccaggattcccgaagcgcaggtcgtcggaagatcgcgcgtgcagatattgtctttgatggagatcaagcggccatccactgcggacttgggtttccctggtcatatccgttaattctgaagtagagtgtgggagtctgatgttgctaccttcttccttgcgcacatctgcttcctttacacggtccagccatggcccctcgcgcaacagcggggttatgaaggcatttaaaccacgtgtgtattggttagcgacgcatctttcagcttcgcgcaataaggacatttagacgattgtgggaggagtataacacagaaagggagtgggaacgtgaatttcccgggtccgtgctgcttttctatggtacctgtccgggtctctgtccccctagaagatatgtgtctacgtacatgtaggtatatattataaacttcatagtccggttagaaatagatacatagctattgctcaaatgtaaacatcgatatcacaattttgacctcggagctacaatgtcaacaacaagtttcttcgggccgagcatgaccgaccaagacgtcatccggatttgctcacctctctcctccttcactacctcacctaccagctatgttctcaagaagtatactacagacggccaaccgaagtgctcgccaggcctcagctcgagctgtaccgcaggtgctcggccaagctccattcggtcggcgatacatttcggtctatggctacacacaggcaaaggctctcatctactccaaatatggcgagcccaaagatgtcttgcggttagtccaagtcctcagctgcagttgagccagaaagctgattaatgtcaatctagcctacacaagcactcaatctccgcgccgcacgcaacccaagtgaatctgcgcttgttggccgcgccgatgaacccagccgacgtgaaccagattcagggtgtctaccccagcaagcctcccttccaaacggcgctcggaaatgcagagcccgccgcagttggcggaaacgagggcgcattcgaggtactgtcaaccggcgcgggtgtcaagaacctcagcaaaggcgactgggttattatgaagcgcacaggtcagggtacctggcgtacccacgcgcagatggaagaatcccagttgatcaagatcgaaaacaaggagggcctgaccccgctgcaggttggcactatcagcgtcaaccccgtcactgcgtaccgtatgctccgtgatttctgcgaatgggattggatgcgtgccggcgaggagtgggtgatccagaacggtgccaacagcggcgttggccgcgcagctattcagctgggccgcgagtggggaatcaagacgctcaatgtcattcgcgagcgcaagacacctgaagagaccgaggccctcaagaaggagctcctggaactgggagctaccgttgttatcacggaggaggagatgcttactggcaatttccgggatatggtcaaggagttcactcgccagggtcgggagcccattcgtctggcgttgaactgcgtaggcggaaagaatgctacctcgctggcaaagactttggctcctgattcgcacatggtgacctacggcgccatgtcgaagcaacctgttgcattgccctcgggactgctgatctttaagaacctcacgtttgacggattctgggtcagcaagtggggcgacaagaaccccgagctgaaggagaacaccatcaatgatgtgcttcaattgattcgctctggcaagttcaaggatactcctgtggatgaggtcaagtggagctgggagtctgagggtccagagttggcagagagcgtgcaaggcactttgggcggctaccgtagtggaaagggtgtctttaccttcagcggcggtgattgagtgaacagccacctggactatatgaatgtattataaagctacgtggtattttcccgatatttacttgacagttgattgatataacatgggtccagaaactaggaataattgtaacagaactgctagaaagtatacttatcaacactcccagttcttcttcacccagtcaagaatcaggtttgttagagacacatgtggcatgtacgcatcactttcctttgcaatatcgacatcaagaccagcaaacttagcagccagtatcacatatttctcgataaaatcaaggtagaccaaatccaccgtctttggtgtctcggatgcattgggagatacgagagcacgaatacagtttggcactcggtagaaggagatgggtgaatggatggtatcatcaccgtctgtgcctgcatcatcttgtgtcgtgtacccgggcacgagatccggaccggacagggggatctgctcgctagccgacggccattgttgggcaataacatcttccgggtatgcaagttgctcgggaggggccaacgttgtcggtgaagattcgtccgtagtttcgtatagaacttgaggctgctcgttcaaaacatcgacaataagttgtgccttatcatatgggacatctttcacgtagcggaaggtgctagtgaatggagatacaataaaagtcgagtcttgggtaaagggccctttgaagatatcgaacctcatagcgcccgtattaacaatggctagcctaggtatgtctccacgagactcatccttcaagtcacgcaaaacctcagtttcaagccaggtgtagatgctgttggggtccgggtacttggttcgtgacatccataaatcatgtggggcacatccgtggacttggtccagatgaaggtcggtccgtgctttggcgatcatccgggagacattgagacctttttcggttgggaaggtctctcgatcaagaccggtgtgatgataataagaaaaaagattgttgtctatgtatctgcgcttgaagacaggcccagcagcagactgacggcttgtcttgctggcgaggccatcgattgacatgaaaccaacagtttccatgaatcgaccgctcgctagcccaaaggccttggaatcatactgtgcatagtcacgcacatgctggtgcccgccgaagaattggattggagtatcccaacgaattccccggatctccttgaagatcgcccggtattccggcgaatgaacaggcacatggccgatcaccaaaaacagatccacttctttatcccgaatggcttcttggaaccagtcctccttgatggtagaagatactttctggaccacagtattgttgtaatttccattgaaatcaaagaggaagccaaaggctactatacggatgccttgattcttggtagtgaacttcttaaaccgcggggctagaggcacaagttgttttgtggtcgggtgaatgatatcgatattcgaagcgagatagttgccccggaaatttggaacggttatgagaagctctgcctccgatgtgttcttctggtatagttcgtggtttcccgacgtcaacaggtcgatgtgctggtgccggacaatgtctgaaaggtagatacccttgggcttggacgagtcatataggccgttcccttccactcggtcaccagtatctataacgagtagatcttgtccttgtgcttctgccttttcccgcatgtgtgttgtaaacgatacatagtctccccagtctgcggagtaggacggcctgcgattattagtacaactcggagctcagcagggtccaaggcctactcctgcagatgaccagccagccagccatgagtatcggtagtatgaatgaaattcagttgcccgaaatcaagtggtcgcagcggagcggagatggggtcgggtgcggagggttgagcggcgagcgccgtcggaagtagccagagcaaggacaacatcattaccaacaatacacccttgaaagagtgtctaggagcatggatttaaagcaagaaaaaagatgcaagatgttgaaagatcgtaaaagaagctgaagggagcacgtccaacaagatagcccacagaagatatgtggtgtaaacaagatgcgagctctctccaattcttgtatggttacagttacagtaccggtgagcagctttgatatcacgtgtcgcccaacatcttcggatttgcagctcaaagattatttggacagcgataagtttcccttaggcatttacttcgattcattcgtccgttcctccattcaattgcttttgcggtccgatttggtctgcgatcttgaattgaatccatttgtctttgtttttcatcttctcaattccatcatatctccacaatggcagctccacgacttttccgcccaacagctcgtctgttctcatcgcgccttgcttccactgctctgcgctcgaatatccgccagtctgcctgtgctccttcaatcctgcgccgcggatatgccactgagaccggcaccaaggaggtcaccgttcgcgatgctttgaacgaggccttggcagaggagttggaacgcgaaaagaagtgctacattatcggtgaggaagtcgcacagtacaacggcgcgtgagtaatcctctaagcttcatttgaatcgaaactgacgttgaacttcctgtacagatacaaggtgacgaggggcctgctcgatcgcttcggtcctaagcgggttatcgatactcccatcacagaggccggcttctgtggtatcgccgtcggttctgctcttgctggcctccaccctgttgtgagtatttatgaaaattacggttgatcgaggatcgcatactaatcgttcatgatctagtgcgagttcatgaccttcaacttcgccatgcaggccatcgatcagattatcaactccggtgctagaactcactacatgtccggtggtattcagccttgcaacatcactttccgcggtcccaacggtttcgccgccggtgtcgctgcccagcactcccaggatttctccggctggtacggcagcattcccggtttgaaggttgtctccccttggagctccgaggatgccaagggtctgctgaaggctgctattcgcgaccctaaccccgttgttgttctggagaacgagtaagattccattccatcttgccagatttcgtgtaaactaaccaatgctaggctcttgtacggccagcatttccctatgagcgaggctgcccagaagaacgacttcgtcattcccatcggtaaggccaagattgagcgccccggaaaggaccttaccatcgtctgcatatctcgctgcgtcggtctgtctttggacgccgccgccgagctcaaggagaagtacggcgtcgacgctgaagttatcaacctgcgctccattaagcctctcgatgttgagaccatcattgcctccctcaagaagaccggccgcatcctggccgtcgagtctggctaccctatgtacggtctttcttccgagatcctggctcagtgcatggagtacggcttcgattatctgactgcccctgccgtccgtgtcaccggtgctgaggttcctactccttatgccgctggtcttgaggccatggccttcccccaggtggacactattgttggccaggccgtcaagcttctgcgcttgtaagccaatgaacgagggcgagtgagaagctcgcaataatatagctatgtgcctagtaccctttcatctgttccatcttatgtcgttgttttattctgcctttgttatccaatcgtttagacagtcttttggaaagcatgtaccattacatccagatcaggaccatcgtaaatgtgcttaaatgtggcttagatggaaattcattgctgccagtaatttaaaacaaaggacctacccttaaacgccagtgtgtatttgatatttcattcgaatcgcaagccattcccgtcatcacgacatcgatcagaccttttgggcaacacacccagcaaaacagtccgttggccgccgagggtcataatagccttctgggccatattcctcgtcatcactttcaacatcaccatgttcactcttttgtctttctttatctgcgggagcatcggtttgaggtttcgggctaatattctcgtcgtcgtctcctagaacgttcttcttcttgactggggctgtggaggccgccgttcccttgacagcggagaatgagcttttgaaacctcccttcttgaaaccagtacctcctccacttggtaccacattggccacaggagtctcgatgactttcagaccggcctgcgcatcggctttacgttctgcccgacggttcttctcgagggcatttggatcccgtgttagctgtttgaggtcttgcaaacgctttctgtgcagatgatcgtatgagccaatatgtgcctcgtattccgggtggcgcgagtaagatttgttgcagaggctgcaggtgaaggagctgagcgcagaccgcgctgattcagtctgtaatggttagcttggcgatagcgaatgtggctgaccaggatggttaattaccctcggagcgggatttgtgaaaccacgctatgtttgttagctgaggtatcggatttggaccacaaaggaagagcataccggtgccattgttcttgaactagagtttaggtgaagttgagtgagagagcgtttagtacggccgggcattgcgaccatgtgtgtattaataacgggtctaacgcgtcgctgcctgtgaaaccaggcaatctatatttaatgtctaggctttcatcctcgtgcactcttttgaagagttatctagctaattagactggctctatttattgagaaatccttctacctatacccaatatctaactctttatagtaaatcaagtaagtcgaactatagtgacattgtagtataggagtcacctgacttgtggatactgctcaggacaaatcgtcattacccgccgaggaactggcctatcacagctgccgtattttagcaactcagcgatctttaaaccccaacatttccctgctttttcttagttcgcctatactactttgtacaaatatggatgcatgattgacgacttatttccttacgagttccattttcacacttttcctccagctcccgagcaccaaaaatcccgataaccatacaatgccgtcccacctgctctccaaaccggacgacatcgacaccaggtctatgatctccctgcaagaattagacccatcacctgtccatgatgtcctggatattgaaagcggcgaattcttccctagggccacctctccgacgcaacatacagctggtatttcaatgccaaaactaggcctgagcggccatagctgggattcatggcgtacgtcgagtgacaaaatgctggatcatatattctaactacgatgaccgcttagtgactggtatccaaaaatactcaacctatccacctacggctttcttcatcctacatctcgcgaacacctctcttataccactcgttactcgctccgtgcccgcgagcgaatcctatcttttgctcacacgacccgtataccaagcacccggactagagcatctcgtcttaacacttcctataattgcgcatattgcctccggaattgctctccgcaacattcgtgctgcgcgtagagcacgtctgtacggcgccgagactcgcgcccagcgaagcacgttatatttctggccgcggatgtcattgcaagcacgcactggatactttatcgtgccgctggttgcattccatgcactcgtcaaccgtgttacaccattgatcgtcgaaggaggaagctctggcgtaggacttggatatattgcccatgggtttactcggaatcctatgttctggaatgtcttttatttcttttttgtgaccgccagtgcgtggcactttgttggtggctgggcgacctggatgggctggagagtgaccacagcgcgcaaggagcgtagtcacaaaggctcgttggatggctaccgtggacccacggaaacaaagtcgaagaggcagcgcaagatgtggtgggttgtcaatggaattgccgcggctggcgcggctctttggcttgcaggttctctcggtattgttggacgtgctggcgaaggtgctggttgggaggccaaggggtggaatgagatgtatagtcaggtcccgatcgttgggaagtggctgtgacagctttgcatgattgtacattatgtatctatatagacttaaacctaatatatatgaggagtctgaatacaaccttacatacatgtacttttatagttgatataaattacaaaacaggtattgttgtgtactgcagactggtccgtgcatagaatctttttctccgtcgcattcaacgtcttttgcgacatgctgtgaaaggcttcgcccatgaacgcctcgttgatttttggatcagcaacgagaaggggtaagcgaatactcattcctaccattattctcgcccaatccccccgcccgacccccacttcgatccgatattgtgtccgattcctttccacttctagagccatggaggttcctcagacccagctggtggaataccagggagacaattatcatgttgtcaaggaaggtttggcgaagattctcaatccgcctgcccaagcggccgcttccaagggaacgaagaaggatctcaaagacgacgatcaagcgcagtccgtcttctacaacccaattcaacaatttaatcgcgatctcagtgtgctagccattcgcgctcacggcgaacatataattgacctgaagaaacaaaaagcggcccaaaagctgaagaagcaggcaggcaatggggataagaaacgaaagcgtgaagataaccagaccgagaacccaagacccgcctcaaaagcagaaaacaaggaaaccatagagacaaacgaccaaccagtcccagctgccttagtccccgctcccgcggttgatcaaggacctcagtcagaagctcaaccagagcaacccgcttctttcactgttcttgatgctctgtctgcaactggactgcgcgctcttcgctatgcctcggagcttccatttgtcacaaaggtcgtggctaatgacctatcagagtcagcaatcaaatccatgaagaaaaacattgattacaacaatcttcaaacgattaaacccaatctggccgatgctcgagtttacatgtatgggcttgaccacgcgagcaagttcgacgtcattgatttggatccatatggcacagcagctccattcctggatgctgcagtgcaagcagccaaagatggtggtcttttgtgtgttacctgcactgatgccggtgtctgggcctcgaccggctattcggaaaaagcattctctctgtacggtggtatccccatcaagggcctccactcccacgaaggtggtttgcgattgatcttgaactctattgctatgtccgcagctaagtacggaatggccatcgagccattgttgtctctatctatcgacttttacgctcgtgtctttgttcggatccatcgatcacccgcacaggtcaaattcctctcgggcaacacgatgctcgtatacaattgcgacgtcggctgtggcgcatggtcaacacagcccattgggtctaccaaatctagattggaccgcaaaggaaaccccatataccaccacggcctggctaaagggcccacagctggacctaactgcgagcattgcggcacaaaaacacatcttgcaggacccatgtggggcggtccgctacacaatcccgactttatccaaaagattttggacatgcttcctggagctgatccagaaacatatcagacctgtcctcggattgagggaatgttgaccactgcccttgaagaggacctggacttaacaccatctgattcccaaccatccactccaaaacagcctgcgccaagcacgaagaaccagcatgactctgcataccctgccatcattcctcgaatggacgttgccgctcgggaaaaataccctttctacttctcactcagcgctctctcaaaggttatccactcaaccaccattcctatcgacgagttccgcggtgccctcagtcacctcggatatcgttccactcgtagccacaccaagccgaactcagtccgcacggatgcgccctgggaggtgatttgggagatcatgcgcgagtgggtccgtcagagagcacctatcaaggaagcctccctgaagcctggaacccccggtgctgcaattatgggcaagagccgtgaaaacctgcgtaaattgaacgatgaagaccaatggctatcgcttctcaaaaaagatctgatgtctgccgtcgaggccggcagagatgtcagtgacttggtcactaaggtcgaagcggctctctaccggtccggatcgcgaaactcgtcccagcgtactgctgcttctgcggagactcgtcccaatgccgatccccagcctgtacccgaaaaggaaaagtcacctgcacagcccttcaagcggcctcaccctagtacccttgaggtggtatttgatgaggctctaggtcgtgaggtgtctgctgcgcataccaagaaacgactcgtgcggtatcagctcaatcctcgtgctaattggggtcctctcaaccgggcagggcgttaacgatattcactacatgtagttatacttagaaaagtcctctgtatggtttatactttgtcgaacaaacctatacctatttaacatcgtagagtgacaagcccagcatgtctactccgcgctattattcccattcctggtactttcaatgagtcatggccataatggttggaatgccccattcgcccaatttcgcccaatactttattgttggggccaccaagtgcttagtcacaattcaactagaatgtaacgttaactaggcaacgagaatgtaaggaactatataccaactacatatatgtttctttcattggtatcgtgaaacgcttctggagcagatacatcttctttctatgaaaatggctgtcggcggctgtttctgcggcaaagtccgcgtcgaatacaacggccaacccctgacaacagttagtacaataggattccctttcgtttagtataaccaagctaatctgttgcaggcactgtgccactgtctcgattgtcgcaaacttaccggggccctctacacgtacaatttcgtcgtcaaaaccgcagagttgaacatcactggaagtccaaaagcagtgccaaaaacatcggatagcggaaatgatatcaagaattatttctgtcctgattgtggtttgtatcttactgaatttaggaacgacagtatctgacgaaagtgataggcacgccgctttatggacacaagataaagcccaatggagaggctgaggaggttacgatcgtccgggcagggatctttgatgatacggagattttggatgaagggaggcctgcggtggaaatatacactgagagtcgattgaagtggctgagtcctgtcgagggggctgggcaatttattggcatgttgtctgtaccttcacttgatgatgcttgacggcggaaagcagaaggagatttctattgtagaatgtcgtgtggactgctgttgcatgtcgaaggtgtggtagatttcatcttcgtattataaaatatgaacactattctaggaagtgattcgaaaactactgtattaaaatgcaagttgaaactcatatacatgcacataaaaactccaagccttttgcgacatatcacataatgacccatgaaacaaaaaaaggtctatcaaaaacacaacattataaagaggatatcaacaggaatagatcatttcggaacattttcgctgccctcttcgtacttctcccagttcgccaaaatagaggcaatgcgaggcgagttggtgagcctgtagacgtcctcgaagtattccttggtgatctcgaagggacgggcagtgacgttggggatgtacttgccgatcaacttgctggggtcgatggtggtcttgttgatcttcttcagcaagaaagaacggaagggcttcacaccagagcgcaagaaggtactgtggaatggcacatcgatacccttgagaggaatggtggcgaaaccacgctccaggttgatgggacgcggtttggcctcagtttgcttgacacattcttggatgatgctgaccaggtggtccttgacgtcctccaaagacatgctctccataagagcggggatgtcgatgttctgcgccttcaggaagttcagcaggttggtgaggcagtcaagagcacggaggtcaccagccgcgacgtattgcatgttggcaacgttgtagttgacaatctcgagcaaccagccagtggtctcggagatgttctcaacaacgtactgcagtgcctgctcgttgaaagtcttggagatacggctggggttgacagcgcacatggagtagttggaacgaccctgtgcatcacgctcgaccgcgacttgcatagtcagaccgcggtagaacacgacagacaccaagctctcaatgggcatgacatcagccagggcggccaaagccgagtattcaccaagcgagtgaccagcgaagctgctgtcgcgttgcaccaatcccttggtgcgcatgtcctcgaagctggccttctccatcagagtcaaggctggctgagtgaactgggtggcagagagaagaccggtgggagaccggtaggtgtacgaagcggtattctcatcgacctccttgaagatcttctcggacttgatggatccgtctgcgttcaccgactcgaaggtcatggccatgtagttctcccgaatagccttaccccgtgggccaccgaagtagactgtcagctccttggggttgttcttgacgatgtcaataatggaaagaccgtagttctccatgaagtgacgatcagcccggtcccagacctcctgggcaactgggctagagccatacagctccatacccatgccctgctcctgagagccctggccagtgaagacgtaggaagtgactggctgctcgacctctgcctcaccctccatgaccttctcttctgtctccttgttgctggcctcaaccttgatgatcttgcgaccagcaatcatgccgacatgctgcagcttgacagtgatgatgtcgttgggcagaaccatgccgaccagcgagacttggaaaccacgaacgcggccaatgttgttctcagcggcccaggtctcgaccaggctgcgaacggcggcactgctgtacatgccgtgggtgatggttccaggcaagttggcatagctagagaagacacgcgacacgtggatggggttgtagtcaccagacacgcgggcatatgtctcgttggaggcgggggcacgcagttctagagcggtcttgccactgagcgggatggggttttcaaagtagactggctgttcaatggaagttccgttacgctggaggtagtcaatcacggggttaccgtgtgagtcacctgcctcgtattcgacagacgcaacttggatgatctccttggtgggaagctcgagaagaacctgcccaacggtttggacgttgctgaagacagtggtgttcttgaaacggatcaagctctgcaagcggaacgtcagggtctggcccagaagctcaacgtcagagtcgtccatgcggaaccattccttggagcggaggatggcgacatcccggctggttgcgaggtgaacctgaatgggaacctcatccttgcgctggaaggtgttctcatagtccacgtaagaaccccggtacaggaactgactggtgacatgcataatgggtttgttgtcgcgtctgatggtgccgcaaacctcgaccatcttaccagaatcctggttgatgatggagttaatctgagccgtggtgtccagaacatcaccaacctttaggggctgggcgccgggcaccatcttgaacccgttggacaagtgaacaagcttcagcaaatctccatcaatggtgcgggggaagataggcttggtgattgcctgccagcctgccacaatagcaaagtccataggggcaaagacctccttgccaggacggtcaacgaaagcctcactggtgttgccaactgcgtgaacaaagtcggcaacatcttgggcagtgatggttttctggccaccactaaaggtggcagtagtaggggtgtcgaagggaacgtccttgttgccgaaccagatccggtagtagaactccttgatgcgatcgttgcggtcacccataacctcacgaataggggcgtatccagtctcggggtgataagtgaacaagaagttcagagggacaacgccattctcggcggtgcggccctcgatcagggtcagcatgatttgccccttctcgttgatcttggcctcgaccgtcttgaccaacttgccagactggtacggctcccgcacactaatgacagtcttcgcaggatcattggggttggagatctccacatacatgcctgccgtgggagcgacaatccgcttcatggggttagactggaagcggtggccctgaacgaagacatcggccaagaacaaagcatgtctccaagagtagacattgccggcaagaagaccgagccagcggtccaagtctggcaaggctgcagtggaagacaagcggaaactggtcttgcttggctcttccgaaataaccaaatcgtcagactccaattcggtggtgtttgtgagctgcccaccgaagtactcaatgacaggaatcttggtgctgtcgccgccgtagacatcgcgcaagaggccagcgatgtggccctggtgaacaccatcaaggatatccttgacgggctcatcaatgatgttggagaagcgagcagccacaggaccctgaagaatacaggttcggccgacatcttggtcgacaacagcctcaagatcctcactctgccacagagaatccttcttgaagaagaactcaaagttctcatccagcacggggacgaaaggcacgggcttctggccgcgcttctggcagagcagcaggaagtgctgcacatcttgtgcgttgatcagctgattggcagcttcgggataagcagacaaaatattgtcgacggtagggtagggggtatcaagatcggaataactttgaagcagcgacgcctggccttcggcagtagtgaaacgctcctcgacacggcggatgaagtcacccgtcaagcgcttgagcgaggcatcgatccatcgcgactcgtgcttgatgtacatgaggtccaccatgcggtgaacgacctcagcataagtcatatcttccagatccacagtctcgcctgcggcgttgcgaccgaaccagaccttgtggaagtcatcattcagcttcttgatgatgtagttccgttgcttcttcagctcaggcacacgcttggccttgtcaagcttgaagatcttctggtccatctcctgccagaacagcacaccgcgagtggccagcttgtggataggctcacccatttcagacagaacggtgatcacaccacctgttgatttctggtaggtcttttcccactccgcatcgtccacaccaggagcatcagcaattgccttcttggcattgtgagaggtgtgtgcctctttggcgatcatcatgcgagatccgaagagacagccgtcgaagggcataggagggtagccgaacttggcggaccacgtaccggagaggtaaggataagtgtcttgcgaaccaccgaagccactgccggcaacaagcacaatgttgtcttgcttgcgaatccggctgtacatctgaagcataggctggtggaagtcctcgaaggagtggtgaccaccgccacggccaccagtccactgaaggatgatggggaacttagggttggctttggcaacattgatgacttgctgaatcgcatcgacggagccaggcttgaaggcaatgtgcttgataccaagggtttcaatatattcattggcaacttcaatagatggcacaccagcgccaatggtcagaccttcaatgggcacgccctccgcgcgcaaccggccgatcaacggaatctgccaggccatcgcacgcgggttgacgtagatcaagttaatagtgataccacgtccaggggggatagccttctcaatcttggtaatggcctccgtcatcgtcttcgcgttgtagtagccaccaccagccagctcgatgtgataaccggcgttcatagtagcagccacaaagtcccaggcaacggtggtgggtgtcataccagccaccatgacaggggggattcccaacagtcggctcatcttggtgtccacgtaggtttgaccagtagatgtctttgtcaagcgagggccgtgttccttgacccagtccacagcatacttgacggaatgctcatcacggtcaaacagttcgggcttgtagccgacttccgcattggttccgtccatttcaccggcgaggatgacccgaacaccggtaccgtccttgtttctgttggtcaaaacgcccagaccagagatgccaccggggccgaaatcaaggatgtgggttgcatgggggaagacagtggctttctcccagttgaccgcatcgtgggtgatcatgcgaaccaatgcgggcacaatgtccttgtcgccgagttgccgcagatcctctccagtcttggtgtggaagacggggatctccagtgacttggcggagatctcaacaacatcttccagatcctcgagaatgcggtcgtacgcagaaacaaggtactggctgtggaaaggagcagtgatagggaggaaacggttgacaaagcgaaccttgcgctgtgtgaatggcacgcgattctggtcaagtccggtgggagccttgaccttacgcaggcgaacattgagaccgtagagcgaaataggaggaccagtcaccacaaagttgcgcgcactgttcactagggaaatggaaatgtggcggtcctcgggcaaatgttggttggtggcatcgatgtgctcctgaacggcggcgagcgagaggtcgcggatagacagcatgggagtaggcgttccctcgccattctcaaccgagtcctgaagaacggacggggcgatagaggtgcgggggtaggcctgctgactgcgcagaccaatccagaatagcatggtcagggcattgcgggcggctgtggcgaaggactcccagctggttgcagttgcaatggcggcggctgtgacgactccctgggagtgacctgtcgtaccgaggaagcggcccaggatatcaccaggctggcggcccaggactttgcaggtaaccatatagtgggacaactggaccaaaccaatcaatggcaaactcacgggcgcggacacgagataatcgatatcaggctgtgcatcccggtcttgcagccattgcaagatatccatgcccttgggatagagcttgctagcctcgggctcgtgcgagagcgtctggagcaattcggcggaggacgtaatcaattcttcgacgaaagaagggtacgtggtgtaaatgttgcgcaattcatcaaagtactcctcgatattgccttgaccaccgaacacagagtagatacccgcggcctcgtcggatgccgcacggaacaaggccgaatcgtagggcttggtgggccggcccgccgcagctcgcccggcgtagtaggcctccacgacttggttcttcttagcaacaatgccggggagcgcagctgccactgcgtgaacatcattgccgcgcatgaaggcacgttcaaattcattcaacgcgagtttcagaacttccaagtagttgccctgtgcatcgtcttcgtcctcgatctcgtgagccacatggccaatgtagcgggctactaactccgtcactgatgatggctcatcgtcttgggccaattcgtctgtgggctcgggtaacgaagcagtaaagctgtctttcaactgcgaggcgtggaaatgaagcgaggtaggaacgaggaaagagaactcgagggacccatgggagagggtgagtgggcggagggattgcgaggatcgaggagtgttgataccggtttggggaccggtcaatgtgccgtacatgatgtggctctctctctctgaaagggaatagaaggagattaagcggaaaataccagagggaccctaaaagcgaagaggggtttcctgtgttctgttagattccgaggacacaacacacacacgatctcggctgcactcactggaagacctgagttctaaaggtctgaagtgaaagggggggtattatcaagggaataaagagaagtagagggacacaatttcaacagatatacacataaaataagaaaagaggtccagagcacgattgagcctgaaggggaaagaaaaaaaaggtctggttgaactgcagacaattcaaaagggtttagcgtgggagaagacccgccccaatgggttctgacttgggttgaacccgttgggacgcagtacactgtgataccggtattgtcatggagcatggcaatgatgttttttaattgattttgaattgatttttgaattgttttgtggtttttttcacttcttttgatatttgcatatgacatatttaaagcagcatcgaaatattactctagttcccacctatctcgtagactccattcgtaatggccgttgggattcttcttgaacaacgtatgttgtacaagctagtctgtcccctgacccaagctagctctaaatgatccacgcaaatcgttgcttagtgtcagatccttcggccgaagctttgaaaccccaacgccctcaccaatttggaccaaattgaccgtgtccctccccattcttccgaatcgcgtcgtcaaatgacttggcaatttggtgggatcatcagcattattactcttctcattgcctgatatcattttcccagttctctcgctgtctccaaggtgggtggttcctcgttttcccgttattttcattgataaaactgcgaaaattaccgtccggtattcgttgataccgcatctatcgccgcgctccatttcctttcccaccttttttttcccttcttctttctggatcaatccaattgtcttggggactttcactgatcacttcatacataggattgactcctattctaattctctcctattactctcttctagtcgtcctacccactccttcctctctccgcttgggcattctacgacaactcttgtcgcgcccaaccccggacacttttgtcctaatttcgtccttctgtttaatcaattgatacccatcacatctatcatgcgtccggaagttgaacaagagctcgctcacaccttgttggtggagctgctcgcctaccaattcgcctcccccgtccgatggattgagacccaagatgtcatcctcgccgaacagcgcaccgagcgcattgtcgagattggtcccgcagatacccttggaggaatggcccgccggacactagcctccaagtacgaggcctacgatgcggccacttcagtccagcgccagattctctgctataataaggatgccaacgagatctactatgatgtcgagcccgtggaggaagaaccagaggctgctgcagagcccgcttcctcggccccagcagctgccgctcccgctgctggagctcctccgccaccccccagtgcaggccctgcggcctcagtggaagatgccccggtcacagcagtcgatattgtgcggacgctggttgctcagaagctaaagaaaagccttgcggatgtgccattgtcaaaagccattaaggatcttgttggaggtaagtgcagcctagtccccttcaaaaaaaaaaaaagttggtctggtctaacaccgtaaacaggcaagtccacattacaaaatgaaatcctaggtgacctgggtaaggaattcggttccacacccgaaaagccagaggacgttcccctcgatgagttgggtgcctcgatgcaagccacattcaacggacaacttggaaaacagtcttcctcgctcatcgccagaatggtctcctccaaaatgcccggtggcttcaacatcactgctgttagaaaatacctggagactcgatggggtctgggatccggccgccaggatggtgtgctcctgctcgccctcactatggagcctcctgctcgtcttgcatcggagacggatgctaaggcctatatcgacggtgtaaccaacaagtatgctaccaacgccggagttaacctttcggctccggttgctggtggtgacggtggaggtggcggtggtggcatggtcatggaccctgcagccctcgatgcccttaccaaggatcagcgagctctgttcaaacagcagcttgagatcattgcccgctacctgaagatggaccttcgtggtggtgaaaaggcctatgtgacatctcaagagaaccagcaagtgctgcaggctcagttggacttgtggcaagtagagcacggcgacttctacgccacgggcattgagccatcgttcaacccgctgaaggcccgtgtctacgactcttcctggaactgggctcgccaagatgccttgagcatgtattacgatatcatctttggtcgcctgcaggtggtagaccgcgaaattgtcagccagtgtatccgtatcatgaaccgctccaaccccctcctcctcgatttcatgcagtaccacattgacaactgcccaactgagcgcggagagacataccagctggccaaggaacttggacagcagctcattgagaactgtcgcgaagtgttggaggtggctccagtttacaaggacgtcgctgtgcctactggcccccaaacaaccatcgatgcccgtggcaacattggctacaaggaagctcctcgcaccagcgctcgcaagcttgagcattacgtcaagcacatggctgagggaggtccgatctccgagtacagcaaccgcaccaaggtccagaatgacctgaagagtgtttacaagctgattcgcaagcaacaccgtctctccaagtcgtcccagatccagtttgatgcactgtacaaggacgtcgttcacgctctcggcatgaacgagagccaaatcattccccaggagaacggccactccaagaagggcggccgcagtgctgccaaacgcgttactgccacccgccctggcaaaatggagactattccattcctgcacctgaagaagaagaccgaccacggttgggactacaacaagaggctgactggtgtctatctgaatgttttggagtcggctgccaagaacggtctcagcttccagggcaagaacgttctaatgaccggtgctggtgccggttccattggtgccgaggtcctccaaggtttgatcagcggtggtgctcaggtcgttgttaccaccagtcgcttctcgcgcgaggtaaccgagtactaccaggccatgtacacccgttacggtgcccgtggttcccagcttgtggtcgtgccgttcaaccaaggtagcaagcaagatgttgaggccctggttgactatatctatgacaccaagaagggtcttggctgggacttggactttatcgttcccttcgctgccatccccgagaatggccgtgagatcgactctatcgattccaagtctgagcttgctcaccgtatcatgttgaccaacctgctccgtcttttgggctcagtcaagacccataagcaagctcatggctacgaaacccgccctgctcaagttgtcttgcccctgtcgccaaaccacggcacctttggtaatgatggcctgtactccgagtccaaacttgctttggagactctcttcaaccgttggtactcggagaactggggccactacctcaccatctgcggtgcggttattggctggacacgtggtactggtctgatgagcggcaacaacatggtcgccgaaggtgtcgagaagcttggcgttcgtacattctcccagcaggagatggctttcaaccttcttggactgatgtctccggccatcgtcaacatttgccagctcgacccagtctttgctgatcttaacggtggtctgcaattcattcccgacctgcagagcctgatgaccaagctccgtaccgacatcatggagaccagcgatgtccgccaggccgtcatcaaggagaccgccatcgagcacaaggtcgttaacggcgaagacggtggagttctttacaagaaggttgttgcagagccccgtgccaacatcaagtttgaattccctaagctgcccgactgggagaaggaagtcaagccgctcaatgagtctctcaagggcatggtcaacctggacaaggtggtcgttgtcactggtttcgctgaagtcggtccatatggtaactcccgcacccgatgggagatggaatccaagggcaagttctcattggagggctgtgttgagatggcgtggatcatgggtctgatcaaacaccacaatggtcccctcaagggccaggcctactctgggtgggttgattccaagaccggtgagcccgttgatgataaggatatcaagcccaagtacgagaagcacatcttggagcacactggtatccgtctcatcgagcctgagttgttcaagggatacgatcccaagaagaagcagcttcttcaggaaattgtcatccaggaggacctcgagcctttcgaggcttccaaggagacagctgaagagttcaagcgtgagcacggagacaaggttgagatcttcgagatccccgagtctggagagtacaccgtccgtcttcgcaagggcgccaccatgctcattcccaaggctctacagttcgaccgtcttgtcgccggtcaggtgcccactggttgggacgctagccgctacggtatccctgaggatattatcgagcaggtggatcccgtgaccctctttgttcttgtttgcactgctgagtctatgctttctgccggtatcaccgacccttacgagttctacaagtatgttcacctgtctgaggttggtaactgtattggctctggtattggtggtacccacgctttgcgcggtatgtacaaggatcgcttcatggataagccgttgcaaaaggatatcttgcaggagtctttcattaacactatgtccgcctgggtcaacatgctgctgttgtcctctactggtcctatcaagactcctgtcggtgcttgcgccacggctgttgagtctgtggatattggttatgagaccattgtcgagggcaaggcccgcgtttgcttcgttggtggattcgatgacttccaggaggagggctcttatgagttcgccaacatgaaggccactagcaacgctgaagaggaatttgcccacggtcgcaccccgcaagagatgtctcgccctgctactaccactcgcgctggcttcatggagtcccagggttgcggtatgcaacttatcatgactgcacagcttgctctcgacatgggtgtgcccatccacggtatcattgctctcaccacgaccgccactgacaagatcggacggtccgttcctgctcctggccagggtgtcctgaccaccgctcgtgagaaccccggcaagttcccgtcccctctattggacatcaagtaccgtcgccgtcaattggatctccgcaagaagcagatcaacgaatggcaagaagccgagcttctctacctccaggaggaggctgatgccatgaaggctcagagcgacgagaccttcaacgaggccgagtacatgcaggaacgtgctcagcacattgagcgcgaagccattcgccagaagaaggatgcccaatacagtctgggtaacaacttctggaagcaggatccccgcattgctcccctccgtggcgccatggctacttggggtctcacagtcgacgacattgacatcgcatccttccacggtacttcgactgttgccaacgacaagaacgagtccgatgtcctctgccaacagatgaagcaccttggacgtaccaagggcaatgcagttatgggtatcttccagaagtacctcactggtcaccccaagggtgccgccggtgcctggatgttcaatggctgcttgcaggtcttggaaagtggtcttgttccgggcaaccgtaacgccgacaacgttgacaaggtcatggaaaagttcgactacattgtctaccccagccgcagcatccagaccgatggtgtcaaggcgttctccgtcacctccttcggtttcggtcagaagggtgctcaggtcattggtatccaccccaagtatctgtttgccactcttgaccaggctcagtacgagacgtacaagaccaaggtcgaggctcgtcagaagaaggcctaccgctacttccacaatggcctgatcaacaacagcatcttcgttgccaagaccaaggctccttacgaggatgatctgcagagcaaggttttcctgaaccccgactaccgcgtgtctgttgacaagaagacctctgagctcaagtattccgccactggtcccgaagccaagaagtctgaaagcactcgccagaccctcgagtctcttgccaaggcaaatgccgccgagaactccaagatcggtgttgatgtcgagcacatcgattccgtcaacattgagaacgagaccttcgttgagcgcaacttcactcagagtgagcaggactactgccgcaaggctccctccccgcagtcctcgtttgcaggccgatggagcgccaaggaagccgtcttcaagtcattgggtgtcagcagcaagggtgctggtgccgctttgaaggatatcgagatcggagttgatgccaacggcgctccagtggtgaacgtaagtgcatgattatcccatgatcccagtgacaaagctaacatatctccagcttcatggtgccgccgccgccgccgccaagcaggccggtgtcaagaatgtcagcgtgagcatcagtcacagtgactcgcaagctgtcgctgttgcggtctcacagttctagagcaccgtgcattttcttttcatgttcgcatatagatcccagagaccaatggttctcttgggttgagacgtaatgattgtgatttatgttttttagattccgaaccagcttcgtctcctggttcgttgtgtttataatgggagtgatgacattttctatgtcttttttctgttgaattttcatttagagcttatagtctcttgattagcgatattatcttttaaaaataacaaagatttctatccgtatacaaattgaagatgtagtcatgactccatagtccgtatctccgcagaccctttctctgtgtacttatatcgcagttcatagcaaccagcttgggagtctggtcctattggcttttattgcgagcagaaaattggccgtacccaacttgaagtattatttaaaaatggaaagagtcatgcaaaataggcgtctttgtacacgtaaaaaccaaatgcatcaagtcagttgcatgttatatatacagctttgtacttttccagtgggcatatcatatcccacgagacaatgtattcttgggtttggtcagtactggggattgtagtaggccatgacgtgcagcttgacaactattggaaggcaccactcgatctcaaacgggcaggaagggactggcaagggactgccccaaggcaagagcgttcctggacttctgcccaaggagggaacgataaaagaagtgagtataaatggaaaggtcaaggcatatattataacccccaaccctcctgcttttcctaggctagctggtgttgaagaacctctggatccttaatttttttcctccttggggatcatttgaagctattcacacttctaacccaccataacccccacccccacccccacaattcgggcaatgggtgtttgtaacacagcccgaaagggaaactgcgatccttttagctaaggttattagttatgcaaccttaaacatgcggaaccacgggtcctcccatcctctaccaatgaaaatcctggcctcaggtctctattcccatttgacattgttcattaactagggattgtatcccattgcttaatttctgtcactgtgtcgaggtatcacaagtggatagggcccgaggctagtaataattttcattggtacatatgtagaggatatcaggtaggcgttcattatggacaactatgaaacaaccaggatagaccgctaacagaagatattcatagttaaagcaatcctagtcacaagatgtttgctggacagtgattggtagatagaaaatagaagtaaaaacatggaaagtattcaacatttaattttgactcggaagtacctttcgcaagcttcagttgcccttccaggggcctggtcgcagcatccgatcctcttttccataaacactgacgtccttgacaatggcaatgaatctccggtggttctccttggattcgccaatacgagggcggaaaaccttcaagaggtcgctgctgaggatgccagatgctgggatggctgcgtggatttcgccagctgtcgggaacgtctggttgccagaaactggagtcgacatacgaaggcctgctgatgttagtttatctcttgcatcaaatatcgattgggaccgaaactcacctctagggccgtcggggctgttggcacggcttccggagagtcgaggcaaaggacttgcgccgcgagacccttgtggagtgccgccacgagaaaccgaagtaggtgggttgagtttcagtttcttgatcttaccaccctcggtcatttcagctccagatccggcagcagtgtcgccatcactgccagatccagcaccaccagcaatgtttcgtacgcgtttcttgccctagagaaatcagtatatatggccaaaggggaattattgtacctacctgcaaagcggatggagagatcggacgcgatgggggttgagacgcagggagatgcatgtttttggccttctttcgagatgtatcggtgccgctcgcgtcggaagcgtttggtgatccaagccttttccgtgatccagcagctgaagctttcttcagggcgtctgtatgcttgggtcgaccggaaggagtatttcctcccttggagagcgcttctttttggttcttttcttcttctgccttcttccgttcttcctccttggcccgttcggtttcgctgtcgtcggagctctatacacattagctttgggtctgctgtagcaaatgagtgaaagcttacctcctcatctgtgtacggattgacgtcagaaccgctgctgtaatcaaagttccgttctctcctcttcagagccttgcgcacacccttgcccaacacacgccgggcctctcgttcacgtttctctcgcatttcttcagcgtcatattccttctcgtccttgagattgaacacattcgccttgagctggtcctctttgatcctcttttccgcatccttggcatcttcatcctcattgaagaggtcatcatgttcttcgtcgtcggcaaatcgatcctcttcgaaatccatttcaccagcttccaatcccgcaccctttccggcggttgtgccctgttttccggcgtagactttgcgctgcttggcgtatgtttccagttccttttcttgctccagctgctgctgcttctccatgaaccatcgggggtctttcactctcttagccatgaatttctctgcttcgtcaatcgtcaaagccttgaaattactcttagcgttaaacttgtaccacttttcggccggtatcattctcatctttccgttgtcgaggacaaagatcgcatgtgtttcggacagggctgcttcgtagtttccaacccaagtgtgctggttatcgaaatcctccagatgccatggcaaggcttcttcgtacttgatccgtgctcgtgcaatttcttcgggggtcatatccgacttgaaaacctgctgcgtcttctgctttggggcatttggtcgtttcgaggttgagccgagggcgggggcgatttgggaaaggttctcagcgcgctctttttcacgtgctgccttgcgagcatcgaaggcttcgcgttccgcttcatccattggctggccatcgatctcggatctccccgaatttggatcatgagttcgtgaacgtgggtcgcggcggtgaagtcggactggtcgcgtaaattgtgattcatcacgtgggtcaacgcttttcttcgaggcaaatcgcgcgatgtggtgcttcagtccctccatcagagctcgctttgtcgtcaccaccgggtaatcaacatatttatcactgagcaaaggaccgctgaatccattcgctgccatgtggttgtttgaaagctcaagcataggtcgctcggacgggaagattgcctggttgtggggcctttgcggtcgtgaaggaagagtcttggtggctactccattgccggcaggagtggcgccagctggtctgggaacaggccttctcttcggtcgaaccaaaggatccgctgcttttggacgacgcatcctcatcagcggtgcaccatttgggccggttggagtgcgagcattcgatggattcgtcggagtcgacatgttgccgacgtacaggacggagtcgtacgagtggtagaaggtgacgcgaaggatcgcactagggtggaaggacagaacaaaggtagccttttacctgttttgtgttgcgacaaggggcggccgacttaaaaaagagtgagagacgctaaagccactttgagagcaccgaccaggaggtatgacggtagacctcggagcaaatgtttacccgtcccgccagattggccacgtgactcggggagatctccgggtcgtgtggtccgtgcattgggaggctcttttaccttaaagatcacctctataactacagcctaactgcgattgagaatagaatccaacggaagcaaagagactaagggtcaaaacaccgtagtcggtctgaactgaagcatctctaagatcctcttgagccagctgtatattcagattatccaagtccttaacttcaaagtcattgagaacagaggcgcatatgcagccgaccattcttgcttttttggtgattgtgattgagtactagatgtagtgtatctgagatttggtataattcactggatttctattgtgaatttctatttccttgttttttaattcatgcaaaatctactgaccgaatcgttgacccggttccagtggtttgtatggacaagcaatccaatcacagcccttgacacaattagtagggaccaaaaacaaccagaagaccaaggacgtacctgtttataaatctccgtcccccaccatttgaaaccatcgacccatcccgggtaaatgaaggcgaagaagacaacgaccactgagaatgccaacccggaatccaatgcggccgacaatgtcattgcatatttttcccaccatgcggtcctccttcgccggatcacataattgaacacaaaacatacaagggcccagatggaaaagttgagcccggttgcaggtgggatccagctcagactgccaaacaagatagggaagttgaccatacgccagaaactcttcttgctgtgtcttcccagaagccacgctccgagaggggcgatggctcctatcaaaaaggcccagacaagcggacggtatagccctcctgggccaaagaagcgctgcgggccaacgactccccagagaatgctgccgttgaaatggactcgagcaatggggcagttgaaaccattgatagcctctggggtgcaaagccccgggacaaaagtgaacatccagttcagcacaccaatttgggtcagactcgagactaaagtcgccatcatctgcacgccaaacagaattcgtggtgggatcttcatgtaatggccgagcttgaggtccgaggaaaatttgatcccttgtgcagagctgatatatgagtaggtcacgaaaatcatgttcgctacaggccttcccgggaatacaataccgcaaaggagttggcagatcagatagaggctgctatgttgattggtgacagccatgatgatacccactgggatgaaaaacacagaagtaataccaagagccaggagtaggccataccaaggtaaatgtgttgggtaacttttgtgcaggttagttgctatcgaaggtcaagggggattgaaaacgtactattccaccgtgaagatggcaatgacaagcatagaaacgaacacaacaagataccacatgaggggagcgtccttatagcgcctcatcaagcgacaatgaacatcttcccctcccaatggaatgtcctggctcgcttcacgtgagctagtccttgggatttcataactctgtcggggagcatcattgcttccacgaaggggctggtacgtctccatgtctggcacttgccgtttttcctcaaaggccttcctagtctgttgccaaatgtccttgccataccagcaaatggtgtgagagacaagggatgtcaaagcagcaaactgaacaccgtaagacagcacgtaggtgattgggagataaactggggagtaatcttgataggccttttcatcaaacaaaaaatccgtggtcaatattcggctcacgttgtatggtcgcccggaattgtcgaacacagctgttgaaactatgggcatatatgcagagaaaagcacatttttataatcttcatttgatcagcagagtcaaattagataagacgggggggccttacaaagtattggggcggctatccagatgacaaccaccagtcccgtgacaatattagctgcagcccaccagggcgtgagtaacggtgagccaatataggcaatctgagcccaatcgaaggtcaagggaaacattccgagaccagaggcaacaccaaactaaagagagttagctatagcagcttaaaaagaggacctgaatgtcttaccaaattcgaaatcaccacatttttgggtgccaaccaagtgatcacattaaaataactcagagcaggcatcaacagtcccgggacaaaataccagagaaaggcccctgcccacacaacgacgaagaacttatatcgggagatactccacccatttgcctttttgttgacagacttgtgcattgtagagaacattgcagtggacatcagggtccccggccagatcatagccgatggccgcacgaggaatcgtcgagttagacccgcgaatgcatatcccaaaacttgagtggaaattatgagcagcagctgatatataattggaacatcctggttgtaaaatttatgttgctcaacaataacctgtcttgggtcagcttcgtcatgagtatttcgttggtctactaacatcagtcgcgaaagcaaacccaaaggaaacattgctgctgatgtaaacgcaagcatgctccttttcgttccaacggccctgggcaaaccaaagtctgactcgagacgccaatggaacaggaggggcctcgatatcaccggagagtgattcccggtggtgaagggttccgttttcaaaaaactcgagcggatcacctgtttgtctgaaaattaaatcccaaaatttgcccagtggatggactagaacaagagcaatgattggtgtaatggcaacactgggatagcgcaaggaaaagaaaagattggcggcagaccccgtcaaagagaataacaacgaaagaatccacattcgaggtgctagagatcattagatataaggagaaaaagcaccagaaagaaagcctactgttaatagaaagagagaaatcatctgtcgccggaacggaagcccgaacttgggcatacggcgaattgtctggaggatcctcatccgaggattttgaatcatcatcatcaatgtcgaggacattttcatcatcacttgtcatatatggtgaagacgccggagtctcctgcatcaccgggttacccggtacagccaatccagtagcgaacgagtatttcgaatcaggacccattcccacatcggacgcggcggaggaaggccgacgatttctctctgcatataagctgtttcgttgtctgacaaaggaatgtgatcgtctcggagtagaccctggtacgttggaagaacttccgatgccatctccgaagctcgcgcggtgtaaccccccacgaactttcggcccacgcgaaacgggtgtgtcctcttctgagccgtccgggtctcgcaatgctccgtaagagggagcgcccaggacgggcgatgaacgaagaagaggggcgcccgacatgaaggcccgaaagcgctgaacaatccctgtgtcggggttcacgccgggtagtggattgtcgatttcggggtagtttccattgtcgctcgcgctatcatcaaaattagaattagtttgatccggtccagcgggaagccactcgcgcctcgaggtcgaggggcaagacagcttccgcgtccgcagtggaatattggccgacgtggtggtggggttatgatgaaatactataagtatttcaggttaggccgtgcattagctcaaaatagatcagggcattgaggaatcagaagagaagaccacagagctagtggaggactagagcgtagtgtggtgaaaaacgacccgttgtccgagctcatgggcttgccccaccgacatcggcagatttatcttccctttcgaacgcaggtaaggttacattcaaggcactaacaacaatagaaagtgttttatagtgttcgcttccatatgtacatttcagtttggtatctaatcattaaaacagttctacaactttttcatcctcgttttgaggcgcctcgatttgaggttgttcgggctccttttcgccttcaccctcaccttcctttgcctcgtctcgcatcaggacttgcactaaccggtcgcatgcctctgtcacattttcatcttcaacgtgcatatgagtttcgcgaatcaatgggtaaaccttgactgctcgcatcttctcccggccgtcccgagttgtggttaggagaagcagggtttcgagatgggttgtgataatggtagggtcgctgtctcgttgcttatcgggcggcaacagttggaggtctggcagcatgtccgccgtatcatcttccgccagctcctctggacctgcaagcgggagcaataagtaaggcaaaaggttggcaccgtcctcgtcaaagagcattggatgcgagtcgatctcaaaagccacattcttgattgtggatgcaacacccttcctccggatatcgcttcggtgctccgtgaagaccgtcagcttggtgatggggaccaccccatcgtactcctggcgttgagtgaaataggccctgccctgttcggtctgggagaggtcggcaaacacgtacgacaggtaatcataattggcgttcttgttgagaccaccctcggcacccttgacgaagcagtccatcacctgatcgatcgcgttctcggaggtagatacggattcggggactttgcgcttgagagcgaatagtttgtttaggttttcggatttgacgaggttggctaaaagcatagccacttcatcggcgttaggctctttgggattctgggatcagacatattagccctgttaccgtctagttatgacagtcgagaaaactcactgtcaatttcgtgagcaattcctcaataaacttgtcatccccggcgaggagtttcaacacttcttcatcgccagacaaattgaccaggatagtcaatgcattcttcgcaatgggctgtaaaaagatatcagtcgaaagtcacccccatgatcgcagataacgcacgtcgtaatcgcggactagaagcatcaaatcgcgaacgggtaggagttgattgcgcttgaacacttcaggctgggtggtggagaagccgacgagggtttcgcaagctatgagctgttagatcatatgttcgtgctgtgtgagaagagttgccatacatatttgtctgattggggtattgccatggtgcaggaattccaccagctataaagagtcgtgagtgagctaatcaatatcgtaggccgtaggcacgcacatcttcgagttcagtcggcatattggagtgtaatgtatgagccagaaagaaggggctgagtatgtggtatcgtcaattccaaaactgtagtctcaaaagattttttttcccgcgcaagtgggggtttctcgacgtcactggaaacgcggagatgcctttcagggctgctatttgtaatacaacacatattcatacatagttatagacaatctgaagagtgtaaaagtgattattcaataataggcaatacacctaatcagtctatatttccaaatatacatgtcgacgttactatattcattcacagaagaggtcggaattgccccgcgatctttagttaaactagccatacctgactaagcacatggtaaaaagcggcgaggccttagcacttaaaacggaaaggcagagcctcaggaggaagtcaccatctccaacatgttgagagttcaattatcagtgaaggttgcgtatgaatttatgctgctcttccgcctaagacttctaactgttgtaaaaatgtcacagtttcctgctttcccttgctagccactaaaatctaggaaactgcatctcttttccttctcgaatttccaggattctttcgaatatccatactattgtaccacagtacgttcctacaaaagccaaccgcccgattcgactgcccttggatggtagaaggcagatacatagagaagagactacaccagccaagcttgccatgccaatatcggaccgtgttggagtttgataattggccaagaggctacccggtcatgaagttagcttttggatgttattatagtggaaagggaaagccaacatacaaacatattgctgagaataatgctgcgaatctgactccgaaagatgttgatattgtccgatgacctgcagagctgtctggctgtgtatcaacaatcgaagccaagccatggcaagcacaggcgtaaaaaaagacaaaggcgccgttggtgtgatcagtctggtgttgcagagctttgtcgctcccagaacaatacccgcttgcccagaaaagccagagaattgctccattagatattgagtccaggattggtatctccttaagccgtatcggtggtgaggagtatgttcaggtgagaaaaagaaatgataaagtgcaaagtaacaatcgaggactttgaactgatgcaggtatggagcacaagacaatgaaagctgtagtagctttggaaacaagtagcacaaattcatgattttctcgagataatactgcaccctctgaaaaatattttgtcttccgaggattctgtatatcggaatcatagtcgtaagcgtcgttgacaccgaaggtcacttgcccaagttagttaagatcaggatcattccgactttggtttcagatcactcctacctaagcataaagggaaagatagagcaagagcaaacagtattgccggtatcgtcgacggaaaatcgccggcatgaagaatacccgaaaaatagagacaaggggcaaccggccaccaaagtgggcggctgaccatgaacaatattcgcatatttttcaaggaagtcgatgtcttgaacatatttgaagaatgatcaaggagtactgggctgtatgctgttgagaaaaggatatgctacgcaaaaatcatatcgtggatagagccagctcttatagattccaatcttgccccgccttaagcgcttctaatatacatcgttttggtgggatacagtattttaaaccacctgcttctactccgtactgcaaaggaagatgccagctcgaaattcacttcctattgatagtctactctagagtacaagggaggcgcacgcgtaatttacgaaatatacgaaatgataacaaagtacctgcatacgaaataaaaggctctttttgctcttttctttgagatagacatacagggatatgaggacagcgctacatgtaaagtcgagtttttgactcgagtcatgcaagactatagccaatacaagcggagttgaaatgcatggcaccataaaagtatgatgaagacccccgggatgattcagctactcctcgtagtgcccaaagggtgacttggaaagtgacctcgggcttgattacaaggattaaatccctgtaagccaccgcgcacgcgcgcgcgagagagagggggactcagcgtaattccgaaacgggccagctgcatggggataagcaccacatggtgctcgtatccagagcgggccgagagcccgttttacccgttacctgcatgccaagatctaagatactctttctgatcctaaccacgataaaggtggcttgcatgcgcattattcgaacctatcacatccatatatctatgttggtggcgggcagtgttggctgtattgtagagtgatactatcatgcaggtatcctaagaatcacgaggtttgactttataagcagccaagcaataagaatttcccgaatcctcgaacatgcttgtactacaatttatctagtcaagctggttagtccggttgagccaataggtgcactccaacatacaggtctgattgggcctgtaatacacgaagcttgagaaaggctgtaacattttgagtctattgaggtgctgggcagacctgcatgaagctgagagttcagccgcataacctcgccctgccataaatctactctttagcttccttcatactcctgtatttgttattttcttggatttgcagtgataatcatatttaatcgaatatgataccccaacgtactcaacctatcagaatagtggtggtagtgatgtactgggagttcgacgtttcccatgaaaggcaagagccttgggacgctattaaggctaaagatgcatgaattggagtatgactggttatgtagccatggcttctttggggtttcatgagagtgatatcttagaccgagtttgccgaggcatcctgcatctcgaaagctcgtttcacaaccccggttctagaaacaattcgcgaactagtccaaagttcgcgatttttggcgaatcgaagcggcatagattcgaagcccgtaatcaagattcgaattcgacccgattcgcaggaaatcgcaaactgcgaacagttcgaaacttcgtgcggagtggtacatcgagaggagcggaaaaagttggaacttaaagctcagccagtctttgccgtctagtacgcgccattgtatccaaaatctctatctctgctgccaagcgcgttttgttgttcagctcgagacctggatcggccgacatgaatttctcgtctccgaattctagcggtaatttcttgtcttgcatttccagcggaagaaggcccagtgcctcaatcaaccacatgaatacggggacacacgacagagcccaaatgaggaaaaggccgaataaagcgagcatcaaaaaaatgatcatcaatgcaaatcctggaccgtccgacccaacgaatcctgttgcacggacggaagctagaaaacatccccaagcggcacagggagcgccaaaaaatacagccagatgagagagcctaggcatggttggtaaagagggaattgaatggggattttgtatatgtggttcggggttgggccgacttatgtagacaacaggcgactcgtgcgccgctagtaaccggaagtcacgcccccggcccgtagtttacccaccccactcgggtggatgcacgactagcaggaactcctagactcatcagcttatcgttcggcacgaatttgactgtgtgcaggttgtagggcttgaatctagcgactatgatgaggcggctcaaagaattctcttgagaaagagttgttcttagccccaaaagaattatgggagatatcggtgatgagatcaactagaagatcatacaatgcagtccaaacagtcacaattcccccttataatcatattcgcgtaaagattatcgaagatttggaagccggaacttggcattgaagtactgaggatatatatatgtaattgaaacgcctcatcctcatctcagggaacttcgtcctgtcaattaagaaccctgtttccaagtcttctaacaagtcaatgaagtcactgggtacttaatcggctcggcagtaagacacaagtggccagtccaagtgcctccgtgagagaatgtgcgtcgagcaagaattcgaatttggcttgctcttgattacatccgcaatgaaatcgtcgggtagatgcctagggctgacttggctgcaaagagcaagggcatttcgggcaggtacaacatatgatttgaatggccccaaatacctaggcaggaggccaattggatcgaataaccgagaccattatctatctcgtactttgacgatgtaaaaagatgtctgtggacattcgtggtggtcaggaaggatataatgagctactgagcttactagaaagtagctctgccaggcacaccatgtaatgattggctctttgtaaggctagttcattcacttgacttcaaaccggaggtgtacgtagttgagtacgtacttccctcgagaaggacccacatatcagaccgtgctagcaatcccatgtgcttaagcgaattgcatttagggaagatccaggtttgtgggaaaagacaaaccaatcacttcatacggcacagttttataaacgatatatcccccactctaaaatacctataatatctaaatcgatcgtactgcaggcaggcgcagagctgaacttcctaggactcccaattggaacaattgttgacctatcaacggtagaccgtggcaccccgcctccctcctagcgaagcggttcgcgagcgtctccatgagatgggcaaggaggctgctagaatggaatggcgagatccttacgtatcgatcgttccgtcctggattaggagactcatgccccccttttattcgcgccaatatcacttctaagggctcgatggcaacgagcaagacctgactgaaaggggtgaatatggtattcgacataggtgcatatcggactattatcgctaaagagctcctctaccccacctttcgagaatacctgcgggaccctatgaatagcaaacttaatgaactttccgtgaccctccccgcgcacagtacctggaggtctgctatccaaactgtggtagcagccctaaacgatgtcgatgaaccctttcttgtaataccgcgaagaagcggtaaccgtcgtgtttttacacaattgttctaaggacggagcgagatggggaagtttgaagaggattatctcttcagggtggaaggtcttggttcgatcgagctatgaggcgcgttcaactataaatcatgccttgttaaccgaagaacgcagtagtccatttttagagaccgagtgattccagaagaacaccaacactgagaagactcgtgcggaataaagaacggctaaagttcatacaggacataccaaaacgaaaacatgaaaaatccagctcctgagacagaaaaaaatgtagccaagcgaggtggtagcagcaagtaataaacaagagtaaaaataagccactcttcgcaccgatacatcgattcaagcaaacaccatccaactaaagaatttcaaattgagacaagctcgccgtccagattggcatattcctcgactaaaatgtctccccagagttgatctgagaccccctctcccctggcgagaagtacatgccgaggaatagcccgaaggctaagtcgatcaatacaggaaatttggccgaataaaatcccaactagctggttgggcatcttggccttaggcagaataagcgcaacggcgtcaatgctagtacaggaatttgacaaagccagactagaatcaacctgcacagctataccgtcaggcgagcgatataagtcgtggatagggtcccgcaagtattctcgaaaggcgggggagagtagctcttcagtgataatggtccgatgtgcacctgtgttgaacaccatctctacctcttcaagctcgcatgtcaggtcttgctcgttgccatcgatccctttcaaggtgatatttgcgcgaatcaaagggaggcatgagtctcctaatccggcatggagcgatacataaggatctcgccattccattttggcagcatccttggcaatctcacgcagacgctcgcgaaccgattcgctacgaggtggtcggggtgacaccgtccccaggtcaacatttgttcggattgggagtcctttgaagttcacctccgtgcctgcctgcagtgctatctcacgaatagctcggcggttaccgcatctgcgcggcattacaagaaaggattcgtcgacgtcgtctagggctgctaccacagcttggatagcagacctccaggtactgtgcgcggggagggtcacggaaagttcatcatgtctgccattcattgactcggaaagctggcggagaagttctctcgggtgcagtgttctttcttcggtacccatagttgacctaaagaacaagattcataagttctctgtaagattatagatgcttgtttgatatgtacttactcttcttcctcttcagcctgaaggcgaacacgtttggtttcaacagcagctactgcttggctgcattcagagtagggtcgtttaaaactagccacgatgagctggtatcagtgattgtgtcaaaatattagtaggtgaaaggctgcataccttacgtcgcgataaacgtagtcgttccctcttgttcaaagtaggaagccgtgtcttttgagtgtcgataaggcaggagcaggatcgatgacagaaaactgacgacagagagtgaatttctatttctcggtcgggtcgcactgggaccaacgtaggcccgcaacgcactggccggctaagtccgttaactctgacacaacatccaacatgggacacatacacgaccctaaggaccctcataaagcggcagcacccgaccaagaactcgcatccgcagcctaagatccggtatgaattacatgctgctgcatatgtattaatgcaaaaataacgtctccctgccggacgggtgaatatgtacggccacccggtggagtacagtcacagagcctcatccctagcctacaatataatccaccaatcaccacccgcggtaacattgacgctttgcccgggtgtgtatcgaacaagatgttgccagatcattgcgcaaaggcaacctttgcaacaacctgatgagcggcatatttccgtgatgtaaagtataaatgaatatattactctgtacggagctggacagtacaaaaaagcataacaataaaaaatgaaaaagcgaaactaaaccttcttcccagataacacccgttcaaaggtcgcaaagttgccttcgttcttcgggtcatagacagcaaagcacacctcacgccaccagtttccacaaaactcagtctccctcagaacctcgagccagcagtgcgcaacctcagcagggggattcgcatacaccccacagcccaaagccccgaggactagcatcccatgcccattgaatgccgcaatacgcagtgcttgcctcatcttagatttggtaagtttgcggtccctgtcgcgcgcgaagacttcttgggtacgccgacgggagggcgagggtgaagtcgagcagtggcgtgagctgtggtgtgcgtgtgggctatggccacgtcgctctttctgagaatctttcagcaccactctccggagtataggtcgatagagagcggcgattgtaatcccgctgacaacaggaagatcttctggtggagtagtgggagactctaacaaattgtgtccggaggctaggtcactccgcatgaccagaacgtaggggctgtagatggactcgtctagagcgagcgggtaatccctgctgtggaggctgagcgccagtgagctgcggtagcagatggattcctcttgtgccatcgcgccatttagccagcccccacctggttttcggtagctagcgaagttgataattattgggcgggggttcaggcttggatcgagacgttgtgtccgtgcggactcaaatagtccgacggccacgttgagggtatcgtcgttgatgattttgaccgtcgctggtgatgggaagcgggggcagtcgctggggtgtaagcgtctgaccgaacttgacgataatttcttagatttgtgggcctgattggtggagttgagccggttcagaagaactgagagaacgccgatggtctcctgggccgttcgcctgagggcctgcctttggggacttgcttcggtatcttcgtgatggtgatgggagtgatgacgtgatgtatgccttgggcttgggatgagctgattttcattcaccatgtcccataatcttgacttgatgttttgggaagacatattttctgtcgggtattgctaatttgatgtcggagagagagaactgatcgtatttgaaccagcgctagcgtgcactatacggcacccttctcaccagcggcataccccgggcaggcttaatcgcgtattccttcggtttctcctggaccttccctaaagttcgtgtaatcataaatgcgaggtaacagaataatctcggattaacagaacttaaagactctatccacctacttctagtggtaggctacggaaccccgtatcatggaccagaggttaatcccatactacgacattaatcaatagaaattaatacatttcacgtataactaaataaaggtccgaatttgacaatccggtcggacataattaataagcaagcgcataactcgtcaaagtcacatgcttcggcggtaaaatgaccaatcaaaataacacccctccagggctgtttcttgacagaagtcaaagcaatttatgcaggtcaacgagcttagctgtgttggtattgtttacagtgctgtagcaccgaatcaagggcctagtgctgcggcgggaccggtgctgcagcacttgtcactcatctcggtccccggtgatttgttgggtttaggcagctggtattgctatcgtgggtaaggtagaagggtggcgtattaggattttattgaatatatgaatgactgcattgtactagagagggaaggaggggttatgtgcccccggactatcagagattgatatatattccgatacttcgattataatgtgttattttgctatgccccttcgtaaccacgtacaagtaattactagtaggggatagttattacctcgacctagtggcctagttgttaccatcttcatgattgtctactatatggctctaccgattggcgactatctgtttgcctgcttgatcgtctgcttgctcgcttcctatttgcatttgttatttctttgcttcatagattgtttgctcgttgagtaagaggtccgaggtttgcaacatttgaaaatggtcagctatatcaacaggctgcctcccactgtgcaatgggctacatatggagtgtggttcgtctgatttagtggacggaacatgtcacccgcattcaggaaactagaggcgcaggacgaaggttaccactagtggcttacctgtcttggctttcaatccttatacgaacgcaacgcttgctttgcaggtgccaccaacaaagatggtattctcgacctccagattaccaagttgtcgagccattttcttgatcatcttctctctagttccatataatattatcaaatatagaatattcaccttcaaaacgatgtccaacccaggatatcccagcgcttggaagccgggcaagcccccacgaagcgtggttcgccatcggcggggcccacctctattcaatactctcaccgcgacggcctatgatttgcagcagatgatgattgccggaaccctgaagagtaccgatctggttgaggagtatgttcgaaatattgaggagcacaatgggtatcttcgtgcggtctctgtatatgcgccagttgcgctggaacgggctcaggaattggatgctaagagggaagccggtgaattcttaggcccgcttcatggaatccctgtttttatcaaggtatagcttgtccttttggtcagctcttggtcctttcatttggctgacacaatcagtgggccaagcctggagatgaagacatccacaggagcagtggcgctcctgaatacaaaatccaccaaaaatgcgcaggttgccgacaaggtaatctatttgccccgtcaatagctgtttcgaggtttcaagtctaattattattagctgcttgctgctggagcggttattttgggaaagacaaccatatcagtgggtacccagagagattcaacggagaatccagaacggcacagctaatgcttattcaggagctaagctatcgaaagtaaaattccatcgacgggttttcttcatgtttctttttgtctaacattgttactagaggaaaaggtctcccatgcggttggtctgcagttgacggccaaggacagtccctatattcctgggggattcgatccaaccgattcgatcggagggcatactgtatgttcttattactcgtccctagagcgaggaaaattgctgatacatagcacataggtacccggcggctcatcctcaggagtttccatcgtcatcagtgcaggtcttgctgctaatggagttggaacggataccgatgcctctattaccgccccggcagttagagcgtctctgtatttaattcgaccgactaccggaattgtttcagtaaatggtacagtcccgtgcccaaagacttttgacaccatcggcccaatgggtaggagtgttcgagatgtagcagacctcttgacggctctcgttgagccaggcaagacaaaaaccccacaaggcggttatgcatcctctgctaccaaaaaccatggaaagtcattcaggattggtacgcttgatccagaagtttggaattacccagatttcttagtcaatcccgtgcccgaagctacagagcgaattgtaaggaatcttttccaagtatctatgggttctatatctaacagacttatgcagaaccgaattattctggagacatactccaagattcgtgagggcttggccagtgtctttcatgagaatgccgaccttccccctgtttcagaattcatgctgaacgggaaacattccatctacacctcttgggtatgtcttttcgtgactttacgaactattggttctaatagacgcagatatcgaatgagttgatgttctcaacgactacctcagcgagctgccaggatctcccgtgaagaacttagaggaacttgtgaagtggaatcaggagcacgcagcagaagcactccctaccggtaatctcccatcaggtaactcatagataatctctaattctaacagaatatccgagtcaggatgtgttgatcgaagcactaagcgcgaagctgtcccccgaccagattgagacgctccgtgagcactatttagccgtaggttcaaacatcgacgcagctttacagaataacgaaattgacattactgtcgcccccggagattgctttttgactcaatatgcctcagccaaaggtacgatgttcttcccgactacgtccaactctgttcgacctattgggctgcaggtgattagttctgctcatcgtgaggaccttcttgttgccttcatgagtgcctttgaagattcgatctcgaaaaggtagcccccaactgcgttccttcaggcctcgaaggaatatagcaaacaagctctaccctagcagagaaaaagggaactttgatgaggcttccaaattgactgaacaggcggaagtggagagcatgagaaaggaaagtcagaagcatcgagtcggatgaagagaaggcatatatgagtcatgacatccttatactggtgaaattcgccacaattgtcaggacacaattctatttcgcaaaaatcccctttggttgtttctttctataagcacatacacgccaggcttgtcatagctacgtcggcgtagaagtggtgtgcttatataatattccgtactcggcgctcaggtccggggcgtgctaggaattacccagtgagcaaaaagcggcaagggctagatacctaaaacggaaagagaaagccaagaagtggcagaggaaagagctacgtatgttgtatgccatctcaatatctcaattgtataatggagaacccaaacctcaacgagatccatgatttcctagtctcattggccttcaaggccggggacatcatcaacaatgcactcccagaaatcaccggcacaggatccaaactgaatagtccgtgtccatacaaacaaccgaaaaaggaaaacagctgatatctctaggtgccgacctcgtcacggaatatgaccgcgccgtcgaaaacatgatctcgacctcactgcgggagaaatacccacattacgagtatgtgttttctcttcgtggctgctagcatgcttctgatggtgtgtattctctcagattccacggcgaggaaacgtatgacccggcacgcccattgaccgatgcgcctacgttcgtcgtggaccccatcgatggaacgacgaacttcgtgcatggttttccatttgcctgtgtttcgctcgggttcgctgttggacgcattcccgcggtgggggtggtgtataacccctccaccaaggccctttactccgctattcgaggccagggcgctttcctcaatcgtgaaactcgcttgccgctgaaaggcgaccatgtcgagcccctgtctggactagctaatgctctcgttgccattgaatggggcgcagatcgcagcgggaacaattgggagactaagattcggacgtatgagaagctgggtaagtccaaggaaaatggtggggctatggtgcgcgcaatgcggagtttaggctcggccgcgttgaatttatgtgctgtggctgagggcacgctggatctgtattgggagggtggatgttggtcctgggatgtctgcgccgggtgggttatcctctctgaagccggcggcattatggcggatggaaaccccggggtttgggaagctcgtcttgacgggcggaagtatcttgctgtccgaggttctccaggcggaactggacaaaaggagatcgtggaggagttttggagccatgttcaaggtaaattgaagtattgatcgcccgcccataatcctctcagactagttgaatacgacagacagtagaggtcataattcaaatgtaacattctcataaatacagggtatatgcctaaggaaactgtatgtacaatgaaaccaatggcgctatatgtgacggaaaccagcgttggtcttcacttcgaagccggactcgctgtcatcctcgacaacttcacgatcagtccatcgtgctgaatcctgactcgatacaagatttctgtcacgggtgcctatgtgcgattcatcttcggcccttgagatatcacttgggccagaagatccatctttcgatatatggagatcggatacatttggcaaattgtctgtatctcttattgactttggatcgacaggatcggactgcccttcaacctcgtcaccagagctagtcggaccaacatttggagacttggccatctccatattttgcttcagagaatcgtcggtttccgcagtgagagtgtggctgaagtgtgtatcaaccaagtgcttcacaacaggccagccataggcattggtgaacatgcgccgcacaataatgttattgtgggcatcaggctcaagtcggacaagaaccttacgccaagtcagatcacggtgataggctctcgcgattttttcttcgaccttgaggccgctttctttatctgcaggcggattctgagagtttgattgcttgccctgtggcgaaccaaatgccaatatgcgtcgttttaccggtaaagggggtggtatatcctctgggtggtagatgcggtcgtggaagattgtccggggtcgtgaggcagggtctgaaatgaattccgcgggtggtaaaggcggcatcaacaagtctccagcacactcgaaaaatgttgtctttggaggggtgtgcattccttcgtggtcatggtcatgattaatgggcattgtgctatcgctgtcgccagtctcaaaagtgctcagggtctggctacgcttataaattctagcattcttgctattggggggattcttgttctgagttgggcgaaacagagaaaaaaagctgtccatgggactgtgagaggtatttccagggatgttttctttcagaacaccttcctctgaaactttgttgctggacacatgactggatggtgccaggaattgtgccggcctcggggagattgtatcttcgtcagagacatcgtctttgggccttgggggaaccttggtcgcagaatatgcatgatgatgaccggcctccattgggagattcaaaggcaactctccatcgtggcgagcaagtcgcggggatttcgagttggcgcctgtcaactctgcccacccccattcggccatggttccaacaagtccattgtccctcctcgctttttcaactcgatccaaacctttccagtccaagaacaaaagagaagacgtccgcaaaggaacaatcccatcattcaccacattcgaatagactgtgcggtgctggaatttcttaagaacctcgtaggcaggaccacaaggaagaatccgaagaagtggcttggagccaggatctgaatggccggggtcttttgcagactctcctcttccagcaataatggcaccccagccacttcgaactttcggtgccgtccaactcaacccgagatcttggccggtacgaccaactagacctagatccaatgcaaatcgaacatacattggattctcattgctgagaccaagaaaaggggttgcaagggcaataaagttaacgggtctgatttgctcaaagaactgaggcgagtgcttctggatatatgcgattgcatatgtctgaatcagcccgccaagagaatgggcaatgaaactaatgcttgtaatctggtaagcatggtcttcatcttgaaattcatgggcattttcttgaggggttgattcagccgaatgagaaaatggttcagctcgctccttgcgagcactaaaaggccgggcaaatgggctcggctttgagcctctgagagggaaatagggttgatcgggatatgtgagaagcaggacatatttggccagccgtttgccgaggtattgaatcccacgctcagtccgaacagcattgccagagaaccctctaacaatgacttgctcttcatcgtcatcgtcggagttatcaccagactggctattttgctcttcagtatgactggatttactgctgagaaaattcgggattagaattttgagacacctaaacgttcagaaaggaattccataccttgtcgggttttctcggtctacaacagggctagcatggggatctctggcttgacgtttattcttcttggaatttctcatgcctgtgtcaatgctctccttcaaatagagcatgtctgcaccgaggttgctgtgcaacccatgtgtcagtaacacgagatgcaccttcttctttttggcgcttttcatcggagcttccgtagactcctccggtactggattatcacacacgggttgcgagtcatgactcttccgttcaacgcttttggaagcaggcttcgctgaggggaatggcggactgctccatagactagttgtatcgtcaacttgaagagcgattgattttgagtacacgcctttcgaggcaagcacctgactacctctagttccaggcagccaatggtcttgtaactttgccggaggccctggagagctatttccactactccatgtaccgcccgaggaatatgccagcgacttttcatcacgacccacaagaagctcaaaatgcaccgctgcactacttgagaatatcacctgcgattgaatctcaacaatccagctaacgctatgtccacttgccggtccaccttgacccggagagccaaagtcgtgtgcttcctggaggttagccggcaccttgatgacggcgtcccaaccacctccggccttaaggtagggctcaaactgcggtgtaccctccagatcctgtcgctcatatttggtgttggggtcgaactttgtgggatagcacgcggcgtatagcgtgtacgggccatggaggtatgcggcgcgcagtgggatggcagatgtgttcttcaccctcacgtagagatttgaagggatgggcaggatcgggtcggccgccggagtgtacgtaaccgtgtatctgatggtcggtttactattagcaatccagaaggacttcggactggagaagcaagaacgactcacctaacgacttccccaacacggacactaccaacttgatggattaacaacatgtcggtcggttcctttgtatccaccggaattgtttcccagccggagaaggtatgaaaacgcgacctttgattgctaggctgtgctgcaccttggtctggggtctgggaggccgaataggtgcgcgcagtgatcagcatcgaatctaatgggcagttccattataatcaagcaaattccaaggcgctagataagagagtctagcgagacaacgatatcatttgctggagcaccccatatgctgggatgggtggagtgtggtggtttacggggtccaatctcggagacggcggaaaacacatgatcacattccttttaaggatcgacaactcataggccttgtttatagccatatacaatgctctctttagttctaggctaatacatggtttctatcgcaactgaatgaacctccgcctaattaatcaagttcagcaaacgcctgggttctttagaaatttccatccaaccgttcctttcgacagcgacgatctttccatcaatgcatacgcgtcgccacctctcctcctcttcttgaaaatcgattcgaacctgttcaacatcggcataggtgaccgtgtcttccttcacatgttgaccgccctggtaggctaggatcatcaactgcattgcatcttccgccggcataggaccgaagcggataaatttcatccgtccatccagggccactgagtccggggagatcaagaagtccttctcaagccgtgggacgagtgcagtaagtgcatacatgtgctcaagcccttccactgcttgttggcgtgtctcgttcggaccattcaaggtggttaatgtgattttgcctttgaattggtgaggtggagtaccgtctgagggatgaagtagctcatttgcggccatcttgaaccgatcggctccaaatttgcgatactcggacgtgtcgctgtcggcgactaatgcagcatggagtccccagctcgcaacaacggctccgtataatgtgtgattaacatcggtgtcgatatcggctcgatgacgaccttcatcgatgaccatccgactgccaagtgagaatttggcagcaaagaccggtatagaagatggactgcctcgaagtagtgttgaaagacccggcaccgggccagatcgtaatccaatggaacttgccatggcattccctgtcccgcaaggaatcaacacaatattgggtgatacaccaatcgatgtcttggatttgtagaaaatctcgagaatgtcgatgagggccccgtcgccagaaagaaggatgatagtctgagggacgccattatgagcccgctccaagaatttcgagcgtgcaagctcgatgatggtttcggccgactttgtttcgtagagctcgtaattctctagaccaatatattcaagaagcggctgtacaacatcttgaaagactgtcttggcattcccggttcctgatccagtcgataccacaacctggatgacaggtgtatcttcatgtcgaaggtggcttgggatcttggtcacaaaaggagatagttctgcaggcagggactcgatatcgatctttctcaaggagaagttctcaggcttgtcgccgtccagttcggttttctgaaagaacagcacactatacgtgggtacatgattggacaacacacagagaatgtcgttgaactcaatcaaacactcaacgcctgcgtgagatgtgtatttcaagttgcgatcaactatatcgaccgggaaaggagcagacatctctgatatctctgagtagtagtgtagtgggagagaaatcaacagttccttgagagggcggggttgacggcttacccggactttaagccatgtcgtactacttgggtaaaaagacgacagactttctagcagaaaagtactatgtaactatgtattatttgactgtcgctttgtaaaaattgaaatgcttaactacttggtcaattatttgtcaacatatacataggcaagacacccaaatcaatgattcccattaggtacagtgagggaataagatggttgaactcttatactaccagcaatgactctatatatatgagctaggtatgggcgactgatgggacagtctggtatacaatgtaggaatgcttgtccgatgtggatgcacgttggaatatagaaacgtagatgtccaacgttggacgtaatcaatttgagattgctagtattcttcttgctacattgttctactagatacataatacagatacagcctcgacaagacagaggtacacaagaatcaatgaaatccaaatatgccaatcacgaaataaagcaaaaaaaaggccatcacaaatacaatgttccccgagatatcgacctcagtcctgagttggggaaataccacgtgagggtgtcggtgaagtctcatgagagctatgcttgtcactgaggtttaccgcaatgaaggtcttgggtagttccacactgcatgcagtggtcagtaacaattcagggggttaaggtagcatacaacttacgtgttgaatttcgctttcaacgtctcaatcacctccttccaatcctggtgggctgtcaggcttcggcgcggggtgcagccgatggaatgcctggaatcgagttgcacgtcaagcgggtcgaaggcatgacaaccagggctgactgatatgcggatggagtaagagtaagagtccgattcactgtcccgagcttcgtacagctcaaagcaaatctgagagagataatcgagttctgggatggcactcctagcaatcttagtttggattccaccttccaagatgcagttcaagagagtgtagatatgagattccttggtgaagtagaagaaggatttggcatcctgcgaagcttgcacctcttctagatctcgaacaatttcctgaaggaggggaagagatgttagaaggccaatctcgagtttctcgctgtcggtgattccatattcctggggagtcacgtagtcgaacaaaaccttggctagcttgtatagttcccggagcttcgaaagccgctcatccatcttggacttggtggattgggagccagggaaaagcttgaagtaatgatcgtatgaatcatctagtgcccgaaggtgcggcagtgactcgggggcaaggacgcgtttcttcaaaccaaagcgatgagcaaacgtctggctttcggtgcgatcctcggatttgtcgttcccggcttcctggtcaagtttcccctctgcgcttgcgtctggctttgttacgctattgcttctctgttcttcatcgtagtcacgggtactgtcctgtggcatgaagacccattccaaaaacggtctattgtggagtgcatcgaatttcatactgtcgtatagctcggaaagcttgctcgggtcgaccttctcggtgtcacagaactccgcaaagagcttttcccaccgctccttaaagagtcgaggatcttcgcccgcgcaccagcggccctgtacggtggatatatcaggggaatccactcgatccacggaggttgtttcagggtcattgggtggagtcgggaagatttgcgatgagctgtcgagtttctcaaagttgtgtcgcatgacactccggtggaacttcatcagttcaactaccctagcaaggacaaccgaaggctctgggatatttttgtccttgggccaagcaaattgtgaaggtgcagacccttctcgcaaaagcaatttcagcttcttcttgactttgtccatgacatccttggcggcatttgagtcatcaagcaaatctttccgaacttgaatcaagccttcagggatatccttctgatccaaaaaggagcatgcccatatttgtgctgtgagaatattattagcttgatccagatcatggcaagggaaatgacttaccactagtgctcactctacgttctgagctggtgaatatacgaacgttattcaacgcttccttgttcatcagcttgagatcatcccgcatgttcagtccaagatcctgcgattgataacgcgcggcatgtgtgggctcgccaccccacttgatcacaagctgcagtttgtccaggatcaaatcgttctcggcggcagagaaccgagaaaaagtcgcacctgagatagaatcacttcgtgactgtgatctacgtaaatcctcgttctctggagtgagtccctccccttctttgggcacagttgtagtggactctccatagagcttgcccttcgacaatggagttgaagctctcactggaggttctcccatttcttctggctttcgtttccggaacattggcttgatctgcactttggtaccaggccaacctccctttttgtctaaagatgcgcggagcaacttgagcttctccttgtcttctaagcccttctccatagccaccttgacggcatcagaaacactggccaatgcggtttcccccttaatcactatctcattctggtgccctttcagcaagtcaacgaaaggttggctgtggaaagtgaacttgaacttttgctttggggtccgatctgcgtgtcgaatcactgccaccatgcccttcagcttccaagagtgtttagaagcaggaagaggcggaagggcttcgtcattggcgtgctgtaccgaaagagccggcgattttgtgttcgagggaccatgattagaggagtagccttcccgggaattcagcttgctgagagcagcgccaatatcagcactctctaccccagatgacgccagtgatggacgacgtgactctgaaacctcggtgggtttctgggtttggccgtaaagcctggagttgctaggagacttcagcaatgtctttagagcttggcgatgagatcctgccgtgctccttctggatgagcctaaatccggtgatggcggctcggaggattccgatatcccttcgcatttgcgtctttcttctaggaaaatatccctgaggatgttggcacacttatcgtaataatcattgttgtccttgacgaagctccagccgttgacgtcaatgacatagcttttatctcccacgcggagcatgtcaaagccacagattctttgaccaaatccatttgaaatcttcgatgcgattattgcctcctccttgccaagttttgtgatgtatcgtatttccttcccgtgggtattgcgccgaacgagaccgtcgacgacgggagacttgcgcgtctctgcgtgacaaaagtttggcccaacggtgtaggctttgacatcttccgcattgtcaaccctgaggaactgctcgtatagataactagcgtccttctcggtgatggatcttggaacagtgagattgggatcatattccgaacttttgttgccgacctttcggaatagtcttcttccacctccgccgtaatgttcatcgttggggaaatagatgtgaatgttgtggtcctcgccattgacaggcttttcaacaaagggctttttgaacactttgccatcaacaatcaaggcctcgccatcctcggacattgagacgttctgagtcagaggagcaccaccaccaattccgttctctgggccttcgagcttgaccccagtcaggtgatagatatgctgggccagctctggcgattctagaaccggaccgccatcgcggttgacctctatccgcttcggggtgggaacacccatgtgatccagaatcatcaggcagagccgccgatcccacaggaccttttgcataggcaggtcattaacacatagcggttttcgaagcttagcatacgcaatggctttgtccagggggaatccatcggaaaagaaagcgagcaagaagtcacacacaggccaattctcgactgcttcatcgaggataactttgtctccaaaaacaatcacctcaaattcgcctttcgattgcagtcgagtcaagatattctggctcggtttgctacgtgctttcacatccaaggcacagactccgatcctccatggcttgagggagccagattccgcctcatagatcgagcttgcagcggtactggcagctgtgcttccactgaaccttctaggtgcatggcttaaggggcgtgtagattgtcccatccgactgccggagcgaggatcaaagcccgaatcggcttttcctgattgattttgtgtcgattttgtgtgtgacgtaggcttagtcgaagccaatgggggttcgaggacgggccctgtgggcgtctgatcgttgtaatcggagtccatatcaagtaaaggcgacgaaaggttgggttctgcaggtctcaagggttcagcaccggctgaagagccgttgctgtgctcagcggcattatccatatgaggggtcaattgtctgtataggattgggttttagatcaattaaatcgtatgagactaattttgatcaatgagatggggattttaaggaagcacaaaatctttggtagcagttcggagaaagaagcgcagatcgagcctggaagctcttggattccaaggttgtattaccaaatatgattggcctcccgcatgggcgacttttcgctggtctaagtttgtatattttcgctcataatcagactagagggctgggaaatggtatgtttattgtgtattcgaatcactgggcttcctcgtattcctataaagtacttataatatatctaaaagtacatatgcccctacccaggtacttattgtagaagtcttcactacatgataacacattttgatagcattttggctatacagagcagtgtcggataagattgttgatgcatttgtgtttgagaatacaatgatttgaacatatgtaacaacgaagagtgacgttaagttaaagatatcaaagagatattccggatatgctcatcacgtgaaggtattttatacccggggaagatgttcacccgtttgaaggcggtctagtgcctgcaggactaggcggggcagaaaaaaacatcaaaaaaaaaagaagaccgagctagtgaagacgacggagataccctttgtgacttgatcaccaagtcagaacggaattatcactccaaaggctaaggggcttattctgattactttggatcctacggcatatccattgtcgttagtgtgtccctcgatatcatgccttcttcggccgataatttcgatctgcctcttgcgaagaggcagaaacgggtatcacaggttaaggctgggacacatggttccaagatctttgctcctttccgtgtaagttgggggagacattaaatcgcttcttttctccaaactgacatgtcgctataaagacactaggattggtgtcgccaacacccgttccctttacgtcagtgcgcctgggtaaatcgacctttcaaatcacaacctccgtgggacactcgctgcagacttatgatttgcgccgaggtctgaacctcatctttctgagtcgaccgcaaacaccagagatcattacggcaacatgtgcgtggcaggataaggtattcgcagcttggggccatctccggtcgcagtccccaggaggcgtctgggttttcaagcgcggcaaaagagttgcagttcttgagggccccgcagacctgaaggggcccattgagcgcttggtggtgtttggctcatgggtggttggttgctggaccggtggcctcgaggtttggagaacgggcacatacgagcactatgccagtctgcggccacaacccgctcggggttcctctggagagaagatctacactggggtaatgtgcaacatgccgacttacctgaacaagatattcgtgggccgatcagatggagcggttgatatctggaacctccgtagtggaaagcttcttcacacgttgccctccttgtcggcagatgctgggcccgtgactgcgattcaacccacacctgctctatcgcttgttgccattgcctataagggcggtgcgttggctattcagaacgtgagctcaggccagctggttttgtctctcaagaacgcatcatcccggggtctcccagtaacttccatcaccttccgcggcgacggattgggtgctggtcacgatggtcgcagctcaggtgttatggccacagcgtcaagtggtagcggcgatatcacactctgggacttgaataatggaggtcgcattgcaggcattcttcgtggagcccatcgagtgtcaagcggcgaaaagcccatgggcgccaaccgtgtcgagttcttggatggacagccagtgatcgtgtcatcgggcgatgacaattctttgaagacttggatcttcgacgagacgccgttctcgcccattccccgacctcttcataggagaaacggacactctgctgccgtcagcgctcttgatttcctgccgacgtcttcggatggatccgagtctggcggcaagtggcttcttagtgcaagcaaggattgcagtctctgggggcttagtctacgcaaagacagccagcataccgagatctcgcagggtagcttggaacgcaaggctaagaaggcagggccatcgaacatctcaaatacagaggatctcaaagctcccgaagttacatgcattgcctgcagcctcaaccgtgatggtggaatgggagtcaccacttccggtccgatctggtcgaacccgaaggttacaaacgccgatgcttccaacgcaaccggctgggaaagcgtggttaccggtcatcggggcgacaagttcgcacgtacttggttctggggcaaaaagagagcaggtcgatgggcgtttgcaaccagtgatggaacagaagtcaaggtgtgcaaattcttaaacatgactgaacaattgttttcctttgctaattcattcctcagagtgtgaccgtttcgcaatgtggtactttcgctgtcatcggatcagctgggggttctatcgacatgttcaacatgcagtcaggtctacaccgacaaagtttcccagctcgtcccccagctggccgtggtaccaaatccaatgctcagacctcgatcactgaggctactagacacaccaaggctgtgactggtttgatgattgacaacttgaaccgtaccgttgtcagctgtggcctggatggcaaagtcaaggtacaccccaccactccctcttttctagagattcgcaaactgacattttctggaatatagttttgggatcttctttctgggaaattcattgatgaactagactggcatcccatggctgccattactggacttcgctataacaaggcgagtgaattagtcgccttcagctgtgacgacctctcgatccgtgtgattgacctcgagaccagaaagctcgttcgtgaattctggggatgtgtgggtcaagtcaatgatttcatcttctcaaatgatggacgatggattattgctgcctccatggactcggtgatacgcgtatgggatatgcccaccgggcatttgattgacatcttccgcgtctcaagcacatgtgtcgctctgtccatgtcttcaacgggtgaattccttgctaccgcacacgccggtagcattggtatcagcctttggagcaaccgcagccttttcatgccgatctcgaccaaaaacctggacgagaacattattgagaacgttgggcttccggcaacatcgggagaaggtggtgctggtcttattgaggccgccttcgtggatactaccgagcaagatgaggcagaaggcccagtactggccacggaacaactacaacacgacatgatgactctgagtcttgtccctaaaagcagatggcagtcattgattcacctagacactatacgggtatgtttctatctctgcacgggtatgatctctagctaacagttcaataggaacgtaatcgccccaaggaagcccccaaggcacccgagaaggctccgttctttcttccttctctgctcagttccagtggtcccgaggccggcgaaatcgccggcgccgaggataccgatgctggatcgatggtcaaaaccgccgaagccgaaaggttgcggattgccaagttgcaaaatggtggaaaccccggttctcctcaatctattttcacccgatcattggcatccggccatgattccggtgacttcagctcatttatcgaccatctcaagaccttatctccggccaaagcagatctcgagattcgttctctggatcctcgggtgcgtgatggacactctgagttgtccgatttcgttattgccctgactgctcgcctgaagtcaaagagggactttgagcttgtcaatgcttggatggcggtctttttgaaaattcacgccgatactgtgagtctcagctctactcaagatgagcctcggtatcgtctattgcaagatgctcttgcaatttggtctgacgagcaacggcgggagggaaagcgcctggctgagctggtgggctactgtcgcggagtggtcggattcttgcgatctgctcggtaatttgaaatggacagatctatacttatgtacttactggataaatatctcgggacatgagtgcctttttttctttgttatctatcacgcgtgttacgttgaatctatatgcatttgttctataaatccagtgattttgcaggaatttagggaacttctgcatcctatctactttgttatcatcttattttatttccgcaccttctaattctattcatatatctcaatttaaggaaagatgagatcaatattccaagttttctaggttgtccaaacttggacctccggcgtcttaccaccctgactaatacggatttttttttttcgagaaacaatccacaaccacgacaagaagggttcttccacgcattggctatggggatcccccatttaactaggcacttactgccatatgccgaaagcgtcttgttagatgggagggcgatcgattcagaacttccgcacatccaagccgttgtcattgacgggcccagcctagtataccatgtctaccgtcgactcctgggctggatggacccaagcagtgatgtccttgactaccagccaacctgcgacgaaatcagtcgcggggtgagcagcttccttctccaattaaccagaatgggagttaaaatgtaagcgctcacaactagtccgaaacacagctatcctctgattatcattttcctttctctctctgtcctttagacataagatatgcttcgatggtgccttgcctatctccaagcgaaaaatccgcttttccagaattgaaaagttaagacatcgactagaattggctcgtcgaaatttgtctctgcctgctacgcccaaatgtcgcgatgtgattccgactgaacgagggcaggtctggtgcagtcgaggcttgccccagcgacgaaaaggccttccagagaatcctttcatggtaccggcggtcttcgaggacctgctgaaccgatggagcaaggaacagatccggaaagaggttgacgatgatatcagttgccttgtcaccgatgtcaatcacccctgggcggaaatcactgtcatggtgccaggagaagcagatgttgagtgtgcccgtgtggcaaaacttaccggctgttcagtgttgacggatgattcggatctgctgcttcacgaccttggtcaggatggctcgctcttgtttctagactcggttcaaacgtcctcgggcgtctgggatccggccgagccagatattcgggggctgaggatctgtccccattcgctctctggccgattgggcatcccaagcgttcagtggtttgcttacgaattgcaaaaaaatgcccacctgcgttttgctgaacttacccggatatctcaggagagcagtaaggcgactgagctctcctctgaatatctggagtttcttcaagaatatcatgacgataccactgataacgcggtgatacctggagcagagcagtccgtacaactgttggatccgagggtatcggagttattttggcagtatgaacttcctagtatttactgctcggatgaacagccacacgtctatctcgggattttgaacgaagatttttccagacgatgtgcctgggaacaaggtcgaacatataggtcccttgggtactcatttttcaacctttcccgtcttgttgtcaatcgatacgcagtcgtacatgaattcgttcgcaggggtggaaggatcgtggccgaggagatcactttaagcggaacaaagaccgtgatctccgacctggatcttctccagaaacgtcttgcgctagcacacgctacctttgacgacggtctggcagcggagagcttctggtttttgtatgctctttccgatatttatcgtgatggatccggtacaaccacagttccaaatgcgaaggggttggagagctttcttaaaaatggatatatggcgcgaagtaccgaatgggcggatattcaccttcttgctcaaatgcaagctgcactgtactctttacgaatactgaagcagctgctcgatatcgcaactcctggtcttgacttggttgataccagctcactactcgcggatttacctccactacacataatgatgtcgcgacagaagatgacccagagctttgccaacactcgtcttgtccggcatgcggtttctaaattgatagaaacgtatggttaacaaatacaaatctacattgcaaacatgcactagtacttcacgaattagagacccctcaggtaatgactattatcagctaaggattcggcattcatgcggtttgtagattacaatgacatttgcattggcggtcgccatagacatagaagacataaatgtgccacttgataaccttgcctgagaagccccgggtccttcaaatgattcattccattggcatataggttttaaagtactagaaccagccctgggaggagcgatgctgctggttctcgatccagtcgttttgtttgatcggatacggtcgattgacagaataatcttgtcttgcggtcgtgcgtgttgtggttgcctggtgtctggaggcgaaaattgttcaagttattttacaactttctggcgaagaaagaaacggatatttttgtgggtatcatgtagatggtcgcaatagcgacagacgattggataaattgtttcaagttgctcatttttcgggggcatcgggaagtcgttcaataacatatttgccgcgagcgacactcatgatgggtgctccaggaatcttgctattatggttgttagaatttggctggtacagcgaaaatgagatcgatgtgtaggttacataccgaatccgtctcttaagatcacgatcgtttgtggcgataatgtagacacgatgtttgatgacacgatcgaccagacagtcatcggcatatgttcccttgtggtcacacttgacgcgctcgaaccgagggtctttggctacacgcagtgcaagtcggtatttcgggccaagcttctccaactcggcaagtacgcaatctgtgacgataggaatacatttggcgtacaaacagtcaagcatggtaggaatgacctcaagtttgtgctgaatggtgtgggaaatgaaattggtatcgaccagcacggagtatgggggagcgagggccgtgttgaactggaagaacattgacgaaggagcttgggggctaagagcgaacttgtcagtacgattattgcgatagtactatatgatgcacttacgcctccttgacgaggtcatccttcttagcctcttgacctttctctgtcttgtcttgattttgcttcctataaccgactgttagcaagtcgcaagaagatcatgtttcgtgattatgacgaacaggcgattgtcgcgcatggtaatggctctcttggccagcgcatacttgcgagtctttttctgaactcccatgatgacgagatgtggatgataatagtgaggaagaggttttttttctcttttcttatcggggaaatctatctcgggttcgggatgactaatcgtgtcgatgggctctgggcatcccccacggacaatcttgtcttcaaaactcccgtgtactcagcaataacctcaaacattcattatgtcgggagcggattcggactttgatctgtcgaaggtaagtccctacctcggcgttcgcaagcaacatatatttccctaaactatgctgctagacagcgttgtccctgttgcattccattccctctaccaacgatccaaggtcggacagctaatccaatatataggcacttgcagaacttgcaaagtacgtgagaccacttatagcttacatcaataaattcatgagattgacatcatatatttaggggtgaaatgactgcctcggccctggaaaaccatctgagcgcaattgaaagccaagtcgatgaactcttggcatctttcgaaaagcaggcggctgctgcagtggaggctacgtctgtcgatgaaacagacccgagtcaaccggaaacagatcaggatcaaaaagtagagccatcgaatagtccagccaagtgaaacttgccatcgcctaacttctctgcaactccaacctctgtgataatcccatctatcaaactcgcgggagtaatgtcaaatgccgggttccagacattgatccctggcgcagcaattttcacggtctcaatcacaatctggtcggtggcctcagaacccgcacggggacctttaatgctggtcacttcagatgctgcacgttgctcaatgacaatgtctctccctgatttcgttgccatatcgattgttgtgagcggcgctgcaacgaggaacttaacgccatggtactttgccaagacagcgagaccatatgtgccaatcttgttggctgtgtcaccatttgctgctaccctatcagctcccaccacaattgcattcactctcactttggtatctgcgagcaaagcggctgccatggaatccgtgatgagtgtagccggaatttcgtcgtgaaccaactcgaatgctgtaaggcgagacccttggttgtagggcctggtctctgtgcaataagcgtgagttaggaggctcttctcggccagcgaacgaaccacacccaatgcggtgccatatccagaagtggcgagagagctagtgattcgggattagtgagaacatacgacggataacggataatgtagcgaatcggccttacccagtgttgcagtgggtcaatacagtaatcattgaattccctctggacgcacgaacggcgatccattctgcgccattgtgtccaattttcttgttatcctcgaggtcttttcccatcatatcctctgccgcctgaataaaggcggccccggcctcccgggccggannnnnnnnnnnnnnnnnnnnnnnnnnnnnnnnnnnnnnnnnnnnnnnnnnnnnnnnnnnnnnnnnnnnnnnnnnnnnnnnnnnnnnnnnnnnnnnnnnnnnnnnnnnnnnnnnnnnnnnnnnnnnnnnnnnnnnnnnnnnnnnnnnnnnnnnnnnnngttttctttccccgccaccccccccgccgcaaaaaaagggggggccgcgacttcgcggccagtagagcccggtgctttcgtgcggttgaccactacagcctccagcttgcgcgcagcatcagcgagattgacggcagtcggcctactcgtcaccagataagcaagcttctctgtgatatattggcacacctcttctggtgattgtgaaagcttgtcgctgtccacagcagaggttagctccgaagcgagagcaagcattgcgacgatcgcaatagcaggtgcccctcggactttcatatctttgatggcgtgccatccatcttctgtagtccggatgggaatgtattcttcgacaaatggaagctgcaattgatccaggatctcaaggttgcccttgctatacttgattgcctgtaacatcttcgtaggtgacggtcaaaggttttaaagaccttggtgaggcgcgaagaaagaaccttaaaaagtccgcgggggactttggaaagcttacttaagcaatgcggggggtaactaactacaacaggtacaatagttaagaggtacaaccttcccaggaacgaggaacgtacctctaacgtatgtagttaaggtaaccaagccaggtaggatcaaatgccatggattactgtgcgaatatactctgcaccgattaaacatgaggtcaatggcacatcgccacatcgccagaaaacttatcaagccgcctaggaaacaaataacgagctcatggtcaccagcgccaatgttgagctcaatacaaagcaggggaaaaaaacccccctaggtacgtagccttcataaccctaggctcgcaagtatggccaactgcatcataagaagagttggtcaatcaccacctaggcttatattctgtcctcctagctagaatgttccaaatcattgcgacgacactcaaatggtgtctttcttatccacttgcaggttgtcataggtgggcccaatcgataacatcgaatgtgtattgtgggatcagctggaagagatgtagagtactgtaggctctagtcagaaagctgtcgcactagccataggattggaagacaagaaaggattgacaaaccgttgtttccgcgcacgaaagcatccccgtagtttcgtcgtagttttccattcacgtattcttcagtcttttcaagggcaatgttcatgtagccatcaactgattgcagttcacctattggcgcattagaagcgaggccactaggaacaagagaaaagtccatacccttgtataccactccagaattcagcttcacgatcacaggcgcaccgatgatctcactcagaaagacagaagggtctttcccttcagaggttgcggcgttctccatattgatactgtggtctgaactttatcaaatgtcagccagagctaagttccatgggaaaagggaagacgtaccaggttgagatgtgttttgaagcagacggagggacgaagcattcgaaagcaagagaccagtaaggcggtgagtgatgcactatcacaagcggggcgggatctgctgatcagttttcgaagaagatcggacaccgccattgtattttgccggtattgccggtcataaaatagtatactttctattcgctttgcaaacatcatccaaaatattgaaatagttgaatttggcaaactatgtgctagcatagctatttgaggctaatctgtaactaataaatcaagaggaaagaggtcttatatagtcaaatattccgttaatcagaaagcatgctagtgtacctttattaggcggtaagcaggacggtgtcttgacccactataggctagaaagtgtgatagcatgttccctccatcttgactaccaattgtttggcttatgcccggccctcgtgtcgcacatcttactctatcactaacatatcgctgattataataaggtgcttcccgagtcacttctaaaatccattcggccatcctaccatacttggatcttttgagggactcatgagctttttcaaaaagccctcatgggcaataaagaatatggaggaaactggcactgaattttatcgacgctcagaacaaacgtactctgatatcattgctgcgaatcgtgaagcacgccacaagccgaaatcaccggagatcccagaacataccgaagatactcaagataccggggatattgaagactcaaaacgaaagaggcggcgtcggcactctagtgaaaggggaaaggggcgcaatgatagcagtccggtgcaaaatgtggcccgtgaggttgataaacttgtgctaccggagccacaagagctctcgggttcctcgcatgattcctcacccgaatcagtcaagccagtcaaacaaagcgaaccaacacagaaaagcagcccaggaaagcgcttgtcccagtcaccgcacaaagtcagtggtccggaaccactaggtgctctgcctgttcaaccagtgattgtcctagcggatgattcggaaactcgaacccctcgacctgttgaacctcctaggcctgttcaaccttcacctcggcctgttcaaccggcggaagttccagcggatgacccgattgtccaaatcatgatcacatccgaaattgcgaacaccaaaccattactcgtccatcgaaaaatgtcacagcggctcagggatgtgcggttggcatggtgcagtcgccaaaatttcgaaccccatatacaggcatcaatctacctgacctggaagggccgacgtctattcgacgtgacaacttgcaggagtctaaatataaataccaggaagaactctgcagcgatccctggcattgatgatgacgactttgcagaccagaaagagctgcgcatacatatggaagcggttaccgatttacctctcccggtcaatcagcaaattacctcgcctgataatgaaaagccccctacagcgtcacagtccccaggagctgaccagggcgagccaatgaaacttattttgaggagtcttgaacacgacgatttcagaatcaaagcaaggtcgaaaaccctgatctcgcgacttatatcggctttccgggagaaacagaatattcctgtggacaacgacatctttctcttgtttgatggggacaaactcgatcccaattcatgtcttggcgactacgacattgacgatctagatctgctggatgtccaaatcaaataaccctcctcgaaggatctgaacaactgaataatagctaatccgggctaatcaaagctaataaaatcttccagtctgactctagggaatttctgtaaagataatgtatatacggagcacaatttcagagtaaacatcaacttagtatagtagtggacctatccatatcgatcacatgatatcagataagccgtgggactctttttttttctccctcggaggggccatcgacgatgttcattatccgctaaattaatctcctgtctagacccaatcgatctttacatacctgagcaacattctcagaatattcgcatcgacaaaccaccaacaatcaccctccaaaacccccacaatgaaagtgatcaccgccaatttcgtgacatgcgccgtgaaggaatgcaagacatccccggcctcattcccattacatttccaagacgccgagctcgagcaacaagaactagacttccagcccgaattcatccgcaacgttctcccccgaattgactgggaagccctgcgcaccgtttccaacgaggtatgaagatccgacacccaagtttacctattcaaccgatatacctatacatacgtgtaggtaattcaccgacaattacaaataagctgactcttgcggtcttatttcagcttggattcccgagtcttccagattcgaaacctgagggcgaggctctcgacaacgagcagacattgaaggacttgcatcggttgcttcttgagacgcatgtcacggaagggaaattgacctgtgggaactgtggtcattcatatatgattaaggagggaattgcgaacttccttcttccaagccaccttggtgagaaatcttcttttcccttgggtatgttcgtttgctaatattcctccagtctgaacgacacaatcccacatgcgcttttcaccaaaatagcttcgcaaatcgataccccaggactaggaatggtcttccttcctttcctttcccttctctgaaagaccctatgcagtggcacgaaggttatcagatatccaaatcgggttcttctgggatttgacacatctacgctctcacatctcctaagactgtgctccagcgccatgacttgaaacggaaaacaggcgaaattcttttggaattggtatattgtacaagagagttcgtagtttatgaaatcacgattgccattgataaatgcgtcaatgctcccacactgaaaacgccagcccgattcaacgccgcccggtaaatgggagtcaatatacctcccaaagactttggtagatagatctcggaaagcgttttttaattaaggaatcccttgcagcccgttgaaccacagagacaggggatgcggtcatcgctgtcccactctctctcgaatttgtagtcgtacgttaactcctcatctaatagcttttgttagcatttgtcttttcctgcaaagcccgcgcgggtcacaaacctctttcaatatccctgagcgcataaatcacaatccgtttgctaccatctaccttaatgatcttggcggtgcagtttggtgtacagctgtgattgatgaatcgcgcaattcctcctctctttgtggcatcgatgacggtattctcgtcgattcggaaaagataactgctgccgatcccgctctttaggtatcgtctttctctcatgtcggcgacctgctgacgcactttctctccgacgtactcaatgatcatgtcattggcagtgatgttttcttcggcatacaagccccaattatgaatggcagagcgagcgaagcgcacaggcttcttgcgtttcttaagctgattgaatcgaagaacgtctccttcgccgttcgcggtgggaagggcttgcttttgtgcattgatgtctgcaatgagccggcggttgttgactcgggttgaccgggatgtcgattttgagattgttttggcggctgcaatcctggcagcctcagctgccgctgcctgggggtctgctttggcatttgcttcacgctcttctcgagccttctgaaccttgatccgatggggcaggtatttggatttttctgcctcgagaatcctttttcggccttccgtccgcgcagcgcctgtggtatttggcacataatagccagggatactgatagcgtcctgggtcgtaccagtttccaggccattgagagctttgatctccttttgtttccaaccccatgcagcaagattttggataattgattctgactgatccagtaggatttcccgcaaaaatcgcaggtcttcatcatccttgaccaggttttgccaaccatccaaatcaagcacgatgttttcatcatcttccaccgtggcgcggggctcatccttggaaactgcccattcgatctctgttctcggctcatcgataggttcggccttccccgtttcgctgatcgagaggtcatcatcctcgggatgtttgtaggggacattctcggtgaattggtctgcgggttgatcgtgcgttggtaatttgtcgtcatcctctgcgaggtcgtcatcaatagccgcgggcgtttctagctcctcagtcgcatcctcatatccgagtatttccgagtcaatgccaaacagctcttcctcctgtcgctgccgctttcgtgcttcttcctcttctgtcagtcgctttctcttgcctgacgtgggagacacctgaagttcgtgggaaagatcgctggtttcatttgtggcatccaggtcgtccgcaagttgagcgctgcgtgatgatcccagatcatccgactggtatcccccatcccgttcaaactccgatgacgttgaactttcgcgactagggggacggctctctcgctcatcggcatccctagtagcaggagtgcgctgctcgtcgtccgaatcttcatcatcgtgcagctgctgtaaacgatgatataagggccggacttctttctttcgaagcggttgcctacgccgttcgtctaggaaggcagcacccgcatggtcaagaccatgggctttacggatacgaggaagagcaaggacattcagacctgatgatctgaggggatctcgcccggcggacatttcgcctcgagagccaggggtgctgtcgatttggaaaacagatcgctttgtaccctcggggtctgaaatacccagcctttcccttttagccgcatgtttactcggttccaaatagtcgtaaagagccggagcagctatgcgtgacttcacatcctcgaggagcttgtccctcaagtcacgaatgatgatagacaatacttctcggcaaggatctaaatcaagcgcccgctgctttttttcttcttcaagatccaattcatcctctttctttgtccgatctttttcggccttgtttcgttgttcggtgcgaagtcgttcggggctgggactccgttcgtagtttggattcccgtagggctggctctccatattcatgatgtaggtgaacaagggttgcatgtgacattgtcggtagcagcgttcagtttcctcctcgccccggcgcgagttctcgaagatgatatagtagccggttttgtcacaacggatatgcttgtatccaaagagtctgagtctctttctcaggtgcggaaccgttgtgctgagaactgggacataacaatgcgcaatgaaaatgtatggatcgcgtttgatctgattcaagataggagtttcttcgaccaatgattgtatgacaggggatcgtgcagcggccctaggaccctctgggataacgagccccggccgtagggatgatctgcccgagggacctttgggcgcagtcggtggtggttcgcttttctttatctggacatccggtctcggttcgattgcgggaggaaggctaatcttggaagcctgtcgctgggactcgactgctttcgcggccattcgatttgagacaaccccgtcgcgatccagctccaccctaatcctgcgcgtgccaatgcgttgttcttttttgcattcgaaatatgcacgtcgggctgcgctagatgctgacgctgacccatttccccgagctgaggtgctatctttgtatttgatggagcagatccccagaaaccggccggtgatggggtctgtgcggtttttgatttcggccacatctccaaagctcgagaaaagtgcgctgatcggggcaatcggggtcaaagggtcgaatcccgtcaccacgacctgaatcggaggcccgggaccaatgctggttgccacatcgtatgaccatggtcgcagattgtaaggcgcgggtcggtattttgtcttctgcttgcagccggatccacgggtataattggcaatcgcacgacgaggatcgggtgcgggatcggcttggccattattcacgatgtccacatactcgagctttttccgcttttcctttgacgaggtccgcttgtccagatcggggtcgtagacaaccttgcagcctgtcacacggagctcgacgtgtcgagtttgcgactgaggggtaggaggggtgtctattggggtgatggaaggtttggtgacatcaggattcggcctggaagaagtgcccggagagcctccgcctggtatctttggctgtgatggactggttactttgcaaaggggcgatgactccgcattggtgagcggtgtcagcgtatcgattggtgggacgtgatttgccgtgggtggtggaggtagcccaatcctatcctctgcgcttttcgccttggcgaaaatggtcaatccaagctcgttgggaaccgatggagtgcgagctcccccctcgtctgtatcaattttgacgggcgtctcaacgggcgcgggggtgctcgaggcaagagacactagacgatccggagtcttttcggaaatttgatcaccctcgacatgtaatttccggcgttcctgcgctgttttgaagcgcttccgttgaaggacagatggtgcggtggggaagaagtctgcaaagccggccgaggcgcgtgacatagtgagaggttggctacacgccagagaccgtggcgcgatcagaaggcagcatccttgacagtcgtgatccggctattgcgaacacatgcgaccgagaaggtcccggcacggcagaattgaggaaattgagatgaaggggcttttacagaagtgccaatgtcaaagaagggatgagaaaacaaaagagatgacaagaaaaagggagaccgaaaagcgatatccaggagctgttgaatctgcggaggtgccgttacgcgcaactcaagagtttgcaggaggctaagacgcgatcgagcggaaggaagtggaatggtggggacgcgggagtttgaacttcacgctttcaagggatatgaactcctgtaaggaaagaaagaaaaggacgtgaaatagatcgaatatgattaggtatgatgtggtgaagttcaagttcaagttccccgggggccgtttagtgactgaatgattcagcaattcttttttttttggccttgaaaggatccccagtgacctcaccgcgacttaataactcactacaataacgcccacagttgaggtacctagtaagtatctttgggcactcattggggaaatcattgatctttcattatcttattgctattggagatgattgttaatagtagccttggtattgatctcgtcaataggttgtactaaaaacaagcccaaaattcatgtcttgaatggttccatagtctgataataggggattcttgcttgcaccctcacaaccccccctgcctgaaatttcagtaccgccttcctaatttggttgagcatctgcctcgacactttgcttctgcataccgctctcctcaccgcctcctcatatctacgccgcttttgtatcaaactgcataggatagtagcaagacagcaggtacgtatggtttgtatgtaaactcctaataaaattcagtcactcatacatgtaagccagaagtgggcagaatacgtagctgaaaaaataaattatggcagaaatatggcagaattctgagtggtacctgatcaggaaggcggtccagggatttcatgcgagcaacaattcccgatatatatacggagtacgtttgaacatgtatcggattcgaatatagagtagtatacataatacaacatatatccctgcgtatgtctcggactttgccgcttttattagggtcatcctacctcttcttccgcctacgaacagagaaagcggtgagaggtgaccctaaaattaagcatggctcccccacccaactttctcccttcaaccagtcacactcatccatcatcaacgaattgcacgcatccatcatcaactagtcgcgctcatccactgtcacagctgattcggacgccgtacttttactggaactgccacaccctccagactgggcccaagcgcactccaacctgaccccaagcgcacttcaacctaggtaattgacagaatgtcattatctatgacagtaagtccttctgtgccttctagtattttcgatactaataatcaagctaggagctgaatcgaaagttgaatggttacgtaccacttaagcctacggacagaaccaagtactttctccgtgacttttataagacccttcctcctgatggaaaagaaaatctggcgcaggatatttcagggtgtgaaaacgatgagacacttcggcaactcgtccaaagtattcggactggtttgctggttcccttgaaagcacagggtggtaaaacacccactgaaatcactccgtctccgcgttctggtattgaagattcaatcgaggatcttaagagccaaaacatcgaacctattagcagaagttatcagtcgcaactccggaaccactgtttagaaagagatggtaataaatgtcttgcaacggggatgtacagtcaggcccatgcctacccaccgaacgtacttacgacctcccttgaagcagctcatattattccatttgcatttggatcctttcaggccaataacagcgagtcagtggatcgaaatacgaagatctgggtcaacctaagacgctacttcccagctcttcgtaacatgtccttcaccccagaacagattaattcagaaaagaatatcctaatgctagacgccgaaattcataaggaattcggacaattcagaattatctttgaagcgaccggagttactcatcaatatcggatcaagaccttttcgggcatcagcacaaggacattgagagatttacctcaaagtcggcttgtctatttcacagttcataatggaagttgggaacttccagatcctcaaattctcgaaatgcatgcttgcattggaaaattcctacatatgagtggccaggcggaggtgatcgacaagatcctagaagattttgcagactgtggtgggcttgccccgagtggaagcaccaatatcgcagaccttcttgcagtgagctgcctcgcagtcctatgttgaagtcgttcaacttttcagtcacaatccacttgcttcattgtgtactcccaatgccggtctcccaccgattctccttgtctgcctcggtcttaccacgagagaagaattccgttaatattgatacttgttcatcctcaatttcgatgttatttttaatggcggacaccagagacgtgacatgctacatttgatgaagaaccatttgcccaaccgaggtggaaagcaaaacagttatttgtacttcctccttttacacatcaagtacacctaagatctccattatgaccagataaatcctatcctatcttccccaatcaattctatgtccgtgctttgacagccatccaacgggcctagtctctcttggaagcagaatctagagctcccagatctgcgtcctctactccgtatatagagaacaaacccacatctagacggcaaacggtcatccggggaaagcgttatctatacagtggtcgaaggaatatgaattcagatagggcttgcgttatatattatgacttcaggggaaatctaggcgctcggtccatgtggacagttccacgaaagatacagaagtggatggctgatggagtagaataaatgtccacttcgccgagagaaatggctttagtcgataggcgtatagaggcatatatcattgtttttcgtggaggggtattttgcagccgagagacatataactacatatggtttcatgtagaaggcatgttgtcagaagtacataaacagatcttcaatgcactgcaatgtggcgggagaggaaaacgaggtggagttcagggaagacgaggaagatgcttccatatccaatcatgtacctaggtcatcgaagtcggaagagatcttctggtgggcccatagtgccctcaagccgactgcaagactgagctgtacggagtagttagttagtctttatcatgagccaattcccgttttttcttggactggatattgaactcgtcaaattggaagggctttacaggcataagttataatcaaaaattattccaattttcaaagagagccaacttttttgcggttccaaggtcggatataccgccacattatgtaagacgccagccagcctccgttacaacacagttaactaaggatgttagtatgaactagcgtgtggtgagcactatgtcaaagttccaggctaatctcggacttagtgagtgagccctgtcatagaaatccatggaacgattggaaccaacgagaatattcgttgaggagagatgcttgaggagaataataccccataccgcgcttatggggacttccaaatccgggtgcccgagtatcaggtgattccctacgtccatggatcatcgtcagtgagcccggcgagttcaaggcttatgtaagaatcaggggtctcagcaaggggaaggggaagcgaaaaccggaatatgcacaacgatgtaattaaatatgtatggagtagatatgatgttatggcggggaatatagttatcattcaagcctcctagtactatttacatagttatagcactgcatcagccctgcctcttttttttttctcctcgcttgtatgaggctgatatctcagcttatccacatcaacctacggagtacttcgtataaagtagcgtagtgggtagtccctctcagccgccgttgtgtatgaaccgaagaaatatatctgaaccgggcaattaattgcgagggaccaatcgtacatgtgtatatgcagttggcgagaccgagccaaggggtatttttgcataaaaacaattaaaatcggtaaaacagcaactgcaaaggcgtggaacgtctgtcgaacctttccaaggttctttttttctcaggggatcctcccactaaggaatgcgccgggccactaaaagatataattagagattttcccccgtatgttttttttttgggactttcaaagctccgccactgctttgcttcgcctgctagctccgatctagcgtgaatatacggcgaagatcagaccgatataggaccccggcactaccaatatagaccccgggactcagattgccaagaaaaggagaaaaaaaaaaggtactatttatttacttgctattattaacaccaacgtcaatggaaatatttaatatttatttttaacaatgttcacgaaataaacatcaaataatatgccaagtgagacattcgattcccctaacaaccagcattggcccgagcattctcctcattggacgaaagcttgcacaaagtgaaagagctaataataatccgcccctccccctaccctctctgttcttgcccccctctacaacttataaatacgaaactcctgtgccttctttgcatctttctatcttgtctcctctctctgctgcttttaattccccctgacaatctttattctctcactaccattgtctttgcattcactttttgcttttgcccatcatgtggtaagctctggtctaccatccatggttgaagtatccatgctcacagttcttagtggaatcttcggctacatcaactacctcgtggagaaggaccgcaggttcatcattgacacactgcttaatggtgagtcgccaagtgtgattcaatgattttagccttttgctcaccgttatttccccaggcctctccaggttggaataccgtggctacgactcggctggtttggccgtcgatggcaacaagaaaaatgaagtctgcgcattcaaggaagtcggcaaggtggccaagttgaaggaactcatcgatcagagcacatatgacatgaccaagaccttcgagtctcatgctggtatctctcacacccgttgggctactcacggtaccccttcccgccagaactgccacccccaccggtaagtcccagaaaacaccccccccggatgatggagagaagatagagaagctaattggatggtcgaacagttctgatcccacctgggagttctccgtcgtgcacaacggtatcatcaccaactataaggaattgaaggctctgctagagagcaagggtttccgcttcgagaccgagaccgataccgagtgcattgccaagctcgccaagtacctttacgaccaacaccccgacatcgaattcacagtcctcgccaaggccgtcatcaaagagcttgagggtgccttcggtttgctgctcaagtcggtccactacccccatgaggttattgcggcccgtaagggttcgcccctagtcatcggtgtcaagacctccaagaagatgaaggtggattttgtcgatgttgaatactcggaagaaggtgtcctttccgcggagcaggcctcccagaatgcggccgccaagaagtctgccacaagcctccttgccccccccgacaagtcactgttgcaccgctcccagtcgcgggcattcctgtccgatgatggcatcccccagcccgtggagttcttcttgtcttctgacccatctgccattgtggagcacaccaagaaggtgctctacctggaggatgacgatatcgctcacatccacgagggacaactcaacatccaccgtctgaccaaggatgatggcacctccaacgtccgtgccatccagaccattgagctcgaattgcaggagatcatgaagggcaagttcgatcacttcatgcagaaggagatcttcgagcagcccgagtctgtcgtcaacactatgagaggtcgtctggatgtagccaacaagaaggtcaccctcggtggtctccgccagtacatctcgaccattcgtcgctgccggcgaatcatcttcattgcctgcggaacgagctaccactcatgcatggctgtgcgtggtatcttcgaagagctcactgagattccgatcgcagtcgagctcgcctccgacttcctcgaccgacaggccccagtcttccgtgatgacacctgtgtgtttgtctctcaatctggagagaccgctgattccctgatggctcttcgctactgtctggaacgtggcgctctgaccgtcggttgtgtcaacgttgtcggatcttccatctctctcctcacccactgcggtgtgcacattaatgctggtcccgagatcggtgtggcctcgaccaaggcatacacttctcagtttgttgccatggtcatgttcgctttgtcgctgagtgaggatcgtgcctctaagcaggaccgacgtgaggagatcatggagggtcttggacagatctccgagcagttcaaggagatcttgaaactcaacgaccccatcaaggagctgtgtgccaagttcttcaagaaccagaaaagtttgctgctgttgggccgtggtgctcaattccccactgctcttgagggtgctttgaagatcaaggaaatctcatacctccactgcgaggccgtcatgtccggcgaactgaagcacggtgttttggctcttgttgacgagaaccttcccattatcatgatcctcacccgtgacagactcttcactaagtccttgaacgcctaccagcaggtcattgctcgtggtggtcgcccaattgtcatctgcaacgaagacgaccccgagttctccgatgccctgaccgagaagatcaacgtccccaagactgtggattgtcttcagggtctgctcaatgtgatcccattgcagctgatatcttactggcttgccgttggcgagggattgaatgtcgatttccctcgtaacctggctaagtcggtcactgtcgagtaaatgtttctttagggcaaggttagacgattcttatgatccggtcatctttttatttttaggtgttttcagcttcgggacaatggaatctcgttttgttttttcaatcatctttctttgaatccaatgcctattagtattttttagttaagaatcagtgtccagctttataaaccgaattgaccgtagaagcattccacaggccaattgcgctcaattgccgtgggtgatgacattccgccttcccccgccaaatgcgggaccgagggatttcgcccctcgagcctcgagctctgattcctaaacacttgtgtcaagctcaattcttccaatcttcaggaaacaacatcatctttctcggacgcccctctcaacaaaaatgactaccatcaaaggccccggcgcagcccagacccacgatggtaaaaccgaacaacagcccttggagaaacacccccagctaataccgattccaccacaggctccggactccgcgtggcgatcgtgcacgccagatggaacacagtgatcattgaccagctggtatcgggagcgaagaagaacttgctcgctgccggcgtgctgccggagaacatcacagtccagacagttcctggtagctacgagctgccgcttgcggtgcaacggtgagtgcggggatgatatctcacacatgacattgtatactgtatacgactgcatactttatagtatactgtatactatgcgctgtagtgctgtgtgctgtgtgcttgctgtatctgcccgtgatagcgttgactaacactacttgacatccagcctctacgccgcatcccagctccaggccaactcctcctccacgcagggcaccagcgccacggacctcctgtcctcgccaacagccgaagtatccggctcgaccaacttcgccagcccgaagaaacccttcgatgcgatcatcgccatcggcgtgctcatcaagggcgcaaccatgcacttcgaatacatcgccgacgccgtcagccagggactcatgcgtgtgcagcttgattcgggtgtccctgttatctttggcttgcttactgttttgacggagcagcagggattggagcgtgctgggcttgggaatggtcatatgcataaccatggtgaggactggggaagtgcggctgtggaattgggtcttaagcgcaaggagtgggctgagggtaagattttgtagaggtactttggaagagaggctgggggctacgatgggaccctctgatatatttggtgtggctttttggaacctgaataacataacttggtccgttgtgggagattgtttttggagtaagaaagggaacatctttcacagaaccataattcttggggagcataatctattacatgttcactcttccatctgttcgccttgacccttgtcctcctcttcttcgtcatccccttccaaagaccgctttgctgctttctctgcttcctcgaggagctccttgggcacttcctcgtggcggcccttggtcggtccgtcgaccgagctgatccacgtcatctcgagctcgaagtccttgtccttgctgtcctcgtgggagacatagataatgcgggcagcttccttcacgccatctagcaaagacagattgcccgaggtcaggtctagtttctcgagttcggctttggcggcctgtcgtccctttccagtagcagcaccgtagtagccctataaatacttgtcagcatattcaaacacccacacagcaaacaagtcgcaacgtacccaatacagtccactaggctcgatcatgtataggccagggcctccagccttggcaccctcgatctttccaccggagccagacttgggtccattgccgacctgtccatcaactggaagctccgcctcggtatcccagccaccaacaatagcagttacaccgaagggccgtacactggagtaaagagtgtaggcctgaacatacccacccaagcgattggccagcgcagcggtcggaatgggacctttgtatgtgcctctccaggaggaagcttcatctctagctctggaaacaaagtgacggccgtcggggacgagtccagcggatacctgtggtagaaagaagacagattagcaacggatacttgaagccttccctggtagcatgcttttgataaaaacgtatttcgtcggggagaggcgacagggagaaagggaagtaggtctcacaattccgacatggcgatcgactgttgcgattctcttgttcgcgcctggctttaggagcttgctagtgatgatcttctccactgccaacactacaccatcattgcatctgatgccgatagcggtacctccgttctcaactgccttgacggcatattcaacctagatggtatggtcagccgaagctgttccgtggctcattcatgagctgggttgtgtttggttacctggaaattccggccgtctggcgagaacaccgagttggagagatcgtagcctgtgccgattgacgtctaaataatcactctgttagcttgatcgggatacagcatagtacattgtgtggatccgaagctgactgaccatgattttggtgaggatgcgatgcggtgaggttcaaggacaatagacgtcaccgtgggtaggccgggggatcgaaagaggtaatctgtattggacagataagggaggagaatggccggtttggagggagactatggataggtagggtgaggttggaagctctggggatgataacggaggttcctaggctaagcagtgacgctgtcgcgtcacggggttgcctggcagagcttccagtcacatgaccatggggtacctaattggtactttgatttgtatgtcttctctacaagcttttggagtactacttcagtaccttgtagtattggatgtattggatgtatcatggacacagcgcgaacacactgtgggcatatatggacccattatggatcgattacaggcataaaatgcagtataacatttgagcatctcctactggccctcggactgcagcccaaccgagcaagcacttgggcatctttgcccctcgatctaaacaaaagacacaaactctctgaatcctttctcgtattcagttttagagggaaaaacttctgaatcgattctgccattttcccattttcccattcattcggatatcgtcgagctatacagaaatctacccctccatgtcctcctcgatactacatcagtgcccgcactgcgggcacgtctccgatatctcaaatgcgctcacagccttcatcgagaaccctcactgtaaacaggtagatggtgctcgctcttacatgttatgccaaggaacctgacccaggggcatatatatatctagtgcggcatgtctgcttccgaaggcgagtcgaaagtgcaagacgaactttcagctctgttcgatagacaaatgagtatgacacagctgcagcccgcccctagagaaactgtcgtaccacctcaagcgccacaaattgcatacagcattacccaacactaccaccactcggcccacagagtcgcccagcacacaaaccagccccagcacacaaaccagccttcaagcgttgatgttctgagacatcacggtcttgatccaaatgcccttaccccggaccagcttatgctcttcgagaacgccgaagcggaacagagagaacgattgattcaaacatggcggctctactcgcagtttgggaatgaagccgccactgccggggactttgctatgcatgattctgctatggaccacagtgaagatgggaatgcctatgctgatgctgaaccctacatggtgtcgggctacgggaacgttgccaatcaagcctctcatatcccgaaagagcctaccactggtgaatcatatgctggctcaaaggacccggtgtatcaaggtcagcaatggtgggagttgacaaaagccggtccgatggagtcgaactatggcgcatttgaagagatgagacgatattaccccagctgtggtgtataccaccattagttctgttaaaatagatctattggaacgaatttcttttgtaagtatcatattattgttatccttgcctctacatgccctaactagcataaacacttaccaattagctatccaattactccctcggtcgaagggatatataccaaatttaggtcacccgagttaaccggtactttttgtcttttggaattctgatttggaatgttatttgagaggagatggaattatttggttctagatacatatttatttgcgtagtgatccatcaaccctcacaattcaagtgctgatttaatcagaaaccaatgccacctgggcatgaccaacggtgaatataaaggagtgttcgccattggcatttcataaaccaatccatcttaactatgccaattggcttccaaaagctctcataccgaaaagtaatcgacggtgttgtgcatatcgataattgaaaagagagctatcgagcaatctctatcgatgttgcagcaccacggaattcattgtataggagacactgggaaaagtcagtaattgaatccatgcacaggacagatggaactgtatcatacctttactcctcttcctcttcctcgagggcagccatggcataagcgagagcgtcggcggtacgcttgacctcatcgacggcatcggcggcacgcttggccttgtagcagccctggccaatgtggccacaccacttctgaagaacaaggggcagattcttggccatggcctcggcgagagcatcggcagagcgcttgacatcgacggaggcatcggtggtccgcttgcagccctggccgatgtggccacaccacttggggagagttgtttgaggagtagcggcagcctggacggtgccagcggcgagaaccgcgatgacgacggaggtgaacttcatcttgatggttgaaggagaaacgggggtttgaaattgaaagttggtttgaggagcgaaagacagatactgagatagctcgatgatggagatgtctggagaaaagaaagcagaacgaggaacagccaggtttatatattcttaaagatcaggatcatcgttggctcaatagtagtctcgttattgagaagagcatgttgggccggagttcggagattcctttactctgaatagagacacggccctgaatagagctctttgtcaaggaacattaacccaaatagaggcactgctcgagatcggcactgtttgatccaccgtgaatagggttcttattgacaacccttagcttgcctcctcaataaggaactctgtctcgtatagagggtccggggcaagccataatttggaatgctttgacaaacagatgggctgataagcccagtggattgaactagagtatattagttaagatggtagatatgttcttttgttcgagttgaccacttgacctgaggtatgtgatattcgaggaccagaagaggatctgaataagaattgaccaaagaaagttagttccggggaataagtgaataagaatgccaagctcatatgagatttcattgtttcattgtagctgtagtatgtctagtgtcgtgtaggtagtgtaggtagtgtaggagtggacatactgcccagcccaagtgatccattcagataagatcgggccggcgctaaccacaagtcgctcgatgccgagcccatccggagccttttctcccgttttcacgcttcccttttccaaccccctctcacttcgattcatacctcacccaatctctttgtttaaatatccaatcactcgaaaatgttctccagaaccgcacagcctgcacgggtaagttcctccctggttttgctttttctcggtttccgcgtttccgcgtttccgtgatctcagtcctttgcaagggagttagtggcagcttcgctaacctgtctctgctctctatagactctgctcagcagtgcttccgcagcttcatctgtcggccgctctgttcccgccagatgtacgcccattaaaattccctgacgtgcatcaaaatccatccccgctaacccatttacccagccttcgctagtgttcagtcggatatcttcaagcccaccaagtacggtggcaagtacaccgtgaccctcatccctggtatgcttcacatgttttgcgccttctccgctgtcatggcgcacgctcttgaactaacactcgacaaggtgacggtatcggtgctgaggttgccgaatcagtcaaaaccatcttcaaggctgacaacgttcccattgagtgggagcaggtcgacgttagcggtgtcgatgccggtaacaagcactccgaggagctcttccgcgagtccctggcttccctcaagcgcaacaagctcggcctaaagggtattctccacactcccattgagcgctcgggccaccagtccttcaacgttgccctgcgtcaggagttggacatctacgcctccatctctctgatcaagaacatccccggttacgagacccgccacaagaacgtcgacctctgcatcatccgtgagaacaccgagggtgagtactccggcctcgagcaccagtccgtcaacggagttgtcgagtccttgaagatcatcactcgcgccaagtctgagcgtatcgccaagttcgccttcagcttcgcccttgccaacaaccgcaagaaggttacctgcatccacaaggccaacatcatgaagttggccgatggtctcttccgcagcacattccacaaggtcgccgaggactaccccaccctggaggtgaacgacatgattgtggacaacgcttccatgcaggctgtgtcccgtccccagcagttcgacgttttggtcatgcccaacctttacggtggcattctgtccaacgttggcgctgccctcgttggtggacccggtgttgtccccggttgcagcatgggtcgtgacgttgctgtcttcgagcccggctgccgtcacgtcggccttgacatcaagggcaaggaccaggccaaccccagtgccatgatcctgtccggctccatgctcctgcgccacctcggtctcgatgaccacgccaaccgcatttccaaggctgtctacgatgttatcggtgaagggtgagtgaacgccaataccgttatgaaaaatgacaatgctgacttccttcttttagcaacgttatgacccgcgacatgggtggtcgtgctaccactcacgagttcacccgggctgttttggacaagatggaggcggctctgtaaattttggaacccccctcactccaatatacctaccgctacgattgaggatgttgcttgctgattcttgcattgtgctctgcacaccgtgaattggtcggtgtcgtcttcacttgatgtattatctttcctttcaatttagctcgacacgttccctcgcaagttatagcaatagactatttttcttttgttcataacgaggacattcattgcattattaattgggtataaacatcgtgaatcttcttcaataggccagtctcatatcgtgcccagaaggtagagagctcatcctccaagcctccaacccattgcgaggcctctagcaggcacctcacgatcgactaatttaacccgagtcgaacttgtaggtaccctatgggcttcccggcaagacaatccgaataacgcccaaaggaatgcgcatacacagacagaatgggtgaaagctatatacttcgggagaatgacttgaagactcctttcatccgggctttttctccttttctcctttttttcgtttctctttttgattggatccgacaaagacgaacatcggtgcccgtaaacaaagcagtccgatcagaaagcgattcgtcgtttgcggccggtgtatttcgagctagccttgacgaccttgcccttcttcgccatctgctcctttttgttcataatccaagccttgtctcccttcctcggaggtccacgggcattattgatctccgtagccttccgccgagcatccaagatattgacatcatccatgccattcacaacccccgtaatatcaccgggcagaccgccgccaccaacagtcagaaccaggtacaacttgctgctcttagtcccggggtcatcttcaaggatacccgcaccaaagccagctttgattgcagccccactgatcatactccgctggacatcattcttcgggtagaactgacacaccgcacgtccaccccgacgaagactagcgtacagaccttcgaagaagcgtcgcagtcgaccttcagcagtgacatcgctggtttccgcattgcacagccactggatcgcactgatgctgattgcggcgtcgaatgtgcccggccggaagggaactccctgaccgatatccgcgaggaatagatcgccttctacttcgcgttgtaaagccacgtccaacatgctgggtgaaatatccatgccgacccatgtgtgcgggccgccgtcttcgggctcgacttcggagagcatttcgccggagagtccggagccgcagccgagatcgaggatgaaggatggcgattttaggtcgaggagttccagtgcgcgactggtcatgctggcttggatgttgcgaattcgcgacgactttgtatactttcgagattcattgtcattgtagaacaggtccggagggctgtagttttcgagatgcgatgttagttttttttccttcttcatgatatatgcagcagagtcatgcggtcatacagggtatcttcagggcgcgacatggtgtgtggtattgaatgtgcaagttgcgttgcgagttgaagttcagaaattcattaaattatttttggtggcgctgcctgaggcatccgtaccccaaaaccgtccacgtttctccgattgcatctcgaatctctctctctggggctgattgcctcccgccttacttttcaacactatcagcgctcgacagctttgtatacactgcgcgtcatgtggattttaccgctagtcggatatttcggggtggttgtcgggtttgcgtttctcaccttggctataggtatgggacatggagtcctgacatgaatgggcaaaagctgacttggaaactccagcttcgggactctactatctatccgagctcgtggaagaacacacggttatcgcccgccgtctgttgacccgtttgatctacggcatcgtcgcgatacaagttctgcttatgatatttgaccgtttccccgtgtcactatctctgctcagcattggttcgcacatggtctacgctagcaatctgcgccgattccccatcgtgaaactatccgatcctcttttccttctatcctgccttctagttggtcttaaccactggctatggttccgccacttctcgaagcccttgcctccgtcgaacaactggcgtcaaccgtatggagtcaattacgatgagatgccctctttctctgaagtggcctcatactttgggctgtgcatttggcttgttccattcgccctgtttgttagtttgagcgcgggggaaaacgtgttgccaagcatgggctccgaatacgtcaccggggaacatgccaaacccgctggactcggtccctctggtagcaagtccaagaacaagggaatggccaaggccttggtggatggtgtccgagattggacaagggagaccggtgaagtcatgggtctctggagaggagaaagtacaagacgattctgagtgagcgaggccacgggaattgataatatatatatatgtaatgaaatttgtattccgccatcgcgtcgtgtaaattgtaataacaaattggcaaagtgcgccagcctccatatcgcgtaactctggaccaccaaatttccagataaataaaagcagataatgatatatggacatcgagccctaatggtagcgctgaaatatgggggaaagaaataaaaggcgaataataaggggaaatatgaagaaaaagatgaagtagataaagaagcagaacaaaaagaaggggtataacggtgaaagttgctggccatggcatgggaactcccagctccaagatggacagccgcatcttgattaccattatcattaaaacattccctcgcgactttgatgtctgagattgccaagtggattaagtcatcattgtgcagtcgtgcaagtcgtaatttttccgaataagagaggcatgaccactggacattccagaatcggaagggcgtggggaaaaaaaaagaaagaaaaggccagtgagaagcgaatgataattcacttgccctggtagaaagaaggatcttcatagacagtacagattagtaaagtccgtgggaatattctcgtgcttgggtcttaccctccataaagagcattgaactctcccgtcgcttggtctttgccgagcgagtgtcttccgagctagcccccaacatgccattcaaggaagaatacgaagcgccgacactctgatgttgatggtggtggtattgctcatgtctggaagacgtcggttggtcatagctaggttgcattggagtgaaaccagtgtcgtggtgtgtcctggggccatcggaaggaccgttgccatcaccaatgggtcggaacgaagtctgctggtacgaaggtgtagggaggtctgagaacatttgatgacgtggggaacgaatatcatcgggcgacagagtgttttcaactgtcagttccatagccggcctcgcaaagctcgaatcagtatcgccaaagatactgtcgtagtccgtgaggaacatcgagaagaccggtgccggaatattgagagttggggcaaagacaatgcccacgttcctgaccgtcatcttgttcacatcggaattgttcacaatctcgatcaagaattgcgatagagctcgtagcaatgcgagattgggtctaggcagcctatgcactagagagttgaaggcagcgaccttcttttgacggtcgtcaagttcttttcaatcaggttagtaaaaaaaaaaaagagaacaccaaatgtgtacataccgagaacgcgaaggaagtccaaatgaagctccctagttaagactgtcgtcggaagctctcgaagatattgcttgaagagagaagccacagcatgaatgtcgtaatactgatctccagacacgaaatcaacatcaccttcagtgttgaaacgttctttcaacgctttaatcaccacattggaaccgctcagacggaagataccttcctccaaggcagcttccttggcatggagatattcaatgcagcgataaaccactgccggcagccctgcatcaatgcctggcagtccgcaatcttgcacggcctctgccaagggtataccaaatacaggtctaacaggacccgtcctctcagcattgtggcctgatgtatcgccgctggcgtggttggcaaggtcgaaagaagacctggaccggaaaccccagatactacgtttcttctctttcgtcgatgtctttgctttgttgccccaagcctccaggtcttgaatgaccgtgccgtttgtgggcctagatatcaatctgggagactgcattgtttggtcgggagacatcgtcgtgtccttgaattctgtcgacaacgtcgtcgggattcgtggggaccggggagcttgctcaacactggaaccaatagtcggaggatcagctggcactgcatcctcaaagctgaaaccctgcacagagcctcctagatcctggtcgggactatcaactcgaccagatctcttgcttccgttgaatattttagacttggtctcggatccggagagtagttgcttttgctgcacgtgggattcatcttgagactgaggctgactcttggaagatacgctgccacgtccctcattttcggaagaagcattctcaacatattccatgagagcatcaacccacgtatcacgctcctcgtcgctctcggcgcagagaacatgccgaacaagtgccgaagaatccttcttctttggttccaataccagaaaggcatggcgatactggttatcagaatcatcctcggccccaggagatggaacattctcgttgggttttggcgattgcttgccgatctgggcatgatgaagtttaatagtacccatgtgcggaccaccgggagattcgtagtatctcagatcaggtccatcgagaacgaaatatctcgctttccagccaccgaagttcttgcctcgtttggtcaagtaaccttccttttgaggctttccgtctggtccacgtggcatgtcgggccttgtctgggcgaggcctttcagcaaacttgtctcgtcgtctcgaggttctatggcatcacttgtcaaaaattggcagatagctagcgcggcattctcgtccattggcgtgtccaacagtctgtcaaagtacgcattcagtgcggcacgtctcaggtcaaccttagcaggggagtgtccgctgaaaatgctcctatccggtaattttccggaaaacggagaagattgtcggactttttgatccagctgtggtaaagcaccgatgaccttttcaactcgccatagctctgacatttctgaccgcaggatcacactgagagtaaaaacaggctcctcgtccaggggcctcgacgccatgtaactattccgggaaggtcgaagccgcgacgaagataccctgacttgaaccagaggaagggcattcggaggtaaaagcaggccctggtattcatcagacatcaaacctcggtagatttgattgtcggggaaatttgcagatctcgggctgtcaatcatgattgtgggatcaattaatggaataggaccacgtccggaagggatgggagcaaagcccgtgggatgattagccattcttggcgagagcggcaatccctgggcctgatacccggctgccatggaagtggaaaagtctcgtggcatgcgcggcatgggagaattaacgggtcgatcttctggcctcgggctcaagggcagtccagggctcaagggcatagcagcgatagagcgcccattgacggacgaagaaggagggggccgagagcccaaaagtgaccccagtgagttagaatcacccacatttggcggtgatctcgtagaatgctccctggggactgttctcgggctacatgttgctgtatcccgggagctctgagaggatgctgtctgaggcggttccacagagccggtagacccagacatatccttctccagcgcagcttcgcggtcctgatcatcctgctctctcgtctttctccgcccacgacccgcactcggaaggccatttacatcctgggaatcgccgtaatcggaaccggaatcggaatcggaagctgaagatgccctgtcattgtctgcttgtcgtagattcagaggcgcaggcggtggtttgcgatttgggtacggaatcctgttatttccgtctcctaccggagacgggatatcggcggcatagactgggcttctggtgtgttcgaagccctcccgccgagaggattcagaagctaggacaatcgatggttggtcaggtttgcgagacacattctctttgtcactgctcggtgcagtcacagacgccgagggctcggcaacgggcaatggcggagcgtcttgtatatctttaagcttcttccgatatttctccttctcttgaaaagcacgctctagatccttgttaaggccgaggattaaagtcctttgtttgtccactaatttccaaagttgcgcgttctgagaggccgcttggtgtttctctttcaagaggtgcacgatcacagcctcggcagatccagcggcattgatgagattgtttatgtcggctgaactcagagcattgacatcaaaggccgatctctgagagctggaggacagggacgagatagcagaatcgattgacgaggtgcgaggcatgatgcgattgggtgtgcgatcacccggcatcgagtgtacagagctgacggaggaagagccagatcgatctggttctggcgcacgggttgatttcggcgtattggtttcgccaggtcgaccgctagtattccccgaatccatttctggtgattgcgacgcgctttgaccagtactggagggtggcgcagtgtatggtgcattggctacgcgagtgattggcgaccaattctgggcggaagaagggttggatttcggagataggggactgtcggatgatgtagatccgccgacacggtgcgactgggggagggaacttgtatgcaacggggagggtgtgatatttcgggaaccaggagtaggaccggggcgttgatcagatcgagctaaataatctcgcggaatgagaccgttattgactgggaaaccggaccgattattagatgaagttggcgggctttcattattctcccgcgggatttgcgacatggctgtcagagtcgagactcatcagaggggtcacgttcggggggcgacacgaggcgaaggcccaaagggcgaaagcgcggaaccccggaagctgaagcttaagcgccagggagcaaaacagggggtattgttaaccgatcaactgattggaaagaaagcaacgatatgaacactccctttgtggcacagagaatgagagttgaaagggtgagagagcttaagtgcagtgtgggggggggagaaaagggggtatcaagccaataagaataataacaaaaaattagataaatactaaggagacgatcatgagagaatcgcagtccttctgaagaggaaaagagaagaagaagcgaggaagatgatctgagatgtctttggtatgcagaatccctttctgtcggggttacctaaggtagtaagaataactatcacgagtaactatataactactccgaggctgtttttctttccagtcactttgaatcattcttttcttttatatattacagtgtatcgtttataatggccttttacaaacaccatagaatgagaaaataatagttatatgaactgttgtagtacgaagccgtcctagcactcggagcaactgcggtggaaccgagtgacatgaaagtgaccgaaagctattggaagttggtgatggaaatattttgaatgtccagggcaatgcctggacatcgtctcacagtggactagtttgagttcggtttcagacttggcttgagatggtttctatctagaaaaatgacctagactcctgtaaatgcgaccgcaatgactatatagtacagaccaaatcaaaaagaaagagaaaaacgccggtcgaaggtggtacagaatgatacaattaggcgatgttgccagccatgcccatgaaaatagcctgggcggccagctgaagggaccagaacccgactttcttgaaccgccttttccgggcttgatcatccacgacatctcgcgcaaatgcgtcgtaggtctgcagaatttatcagtaatgatcgggggaggaaaagagaaagggtactcactgcagctgacaggtcatccatcaggccactgtcaaagacggtccagctgccatcaaaatctccaacgcgcttgactaagcggcaattgatgggaataaaagtgcgtttggagttgatataggcaacaataggacgaatcagtgcattgttgatgtaagacaggtcacgggtgaagatgggtacgacagctcgaacgttgttgaggtgcacgcgcatatccatggcgatgaaacgtcgatcttcagtctcggaatttgtactggaagacgaagatagaggttccggataacgattggtggtgactgtggtttctagccgatcatagaaatcaaccatcaccttggccaagctctcatcattttctgcaggtaacatgatatcggccacaatatctactgtcccttcgtgaatccaagagaagggaccctgaacaccgcgattgaggtggtcgacattgagtccatcaactcgaatccgattatgtttcttccacgggcttggcttgccgtcttcttcttcttcttcgctatcctgccggaggcccgtgaacccatgggtttgacgagcgtggattgtgaacaaggagttgtcataggacccagacatcatgttggcagagaggaaatcgtagaagagccattgcttccgcaattgagggaggtcgcacgagaagatgctcacggagaagggccggaagttgtccggttggtaaatggtgacaagcagatcatgcatcttgaaagagtcaatctcaaagtcaccaggaaggtgctcatgtcggtaggatttaggatccaagtcctcctccggccagtaaacgtggcggcggtcaacaacacctcgtatacctttcacctcaacatcatgaagtgggccctttccattgagccatttggtaaatgataatgtcacgttgaccgtctcaatcgacagatcaaattgtgtgtagttggtatcttcctcttcatcagatactacctgaaaatcttctaatccagtatcacctcgagctgcggctgcagccgccgcagacttcggagatcccttactgacatggcctgtgccttggcctggtcgcttcgacacaaagacattcttgaaggtgatgacgccatttttccacttgggcacgattgcagattcaaagacaactttgactccagaagacttggtaagatagttacccacccaccccgccaatgtttctattcaagcacattagtatccagaccttattgcggcataaagtggatggatgtaccttgagcaaagactgtgttgatcgcaaggatcaggagcgagaagaaagtggtagtccccacgacaacccagacgatgtgacccagcaaaacccacgagaataaggcagttatctcatccatattgtaaggacgaacacttcttatagaaaaccatttgaatcgtactttgaggcgtgaccagaacccagttgctgcagctaaaagctcctccttggttggccgatgtagctgaggcatatgtggtaagcgatccattaagtggcgattagtcgttgttggttgttgagtatctttgggtgggctgacttgtgaatgtgcggtggatgtatctttgccggattggccgggtttttgggaatggtcattttcgttgcgttcatgagtgtcttgcgaagctgctttcccgcgtcgacggtcattcgaggtgtgtaaagttcgcttccagacatgctgggcggcgattttcggagaggagatgatgcatgctgcggtattgtccgcagcagttgaggtaggtgagacgccgaggaccaagaagccaccggaagcgaatcttttgaaccgcgtgggttttgttgggagcgtcgagatgcgtcgtgagtggcttgaaagggacgaatcgaggaatgatcttgaggcgtaagcatcggaggccgatacgcgatttattcgtatgcgaccaagaaatggatttgctgtatcccagatatgggcatagagccggcgtcccagattggcagacatgtttgtctttacatactggacatgaatgagaaacttgacacgaaaatatgacaggcacactgtatcatgaacagcagttgacttgttgacaagaagcttgaaagcttgcaagagttgcgaggagcccgaatgaaatcatcggagtttgtcttgtttgcagcaaaaaattcccttccgcccacacttcatttttccgtgaggggggaactgattaaattttacgataacagattttatgagggaaaaaacttgattccttaagcaacacaatgtcggcacctacagctattcgccagccagagcaggccctagagtttcagccagagactgtctctcatggtgagtactcgatccgatctgcaaatattattttcaaggctgacaatcaatagatcaggatgatgaagttctgatcgatgtacaagccgtggacgagggcgctccgattaaccccgtcgccgagtctgcggaggacaccgaaatgcgcatcgatgaggaaggtcgccctgtcttcaccccggccaaggacgtcgccgccgcatatcggatcgagacacgaaaggtgcctgtcccaccgcaccgtatgaccccgctcaaagcgagctgggccaagatctgccctcctatcgtcgagcacctcaagttgcaagtgcgaatgaacatcaagacccgatcagtagaattgagaacctccaagtttaccaccgatgtgggagctctgcaaaaaggtgctgatttcgtcaaggccttcactcttggcttcgatctcgacgatgcgattgcccttctccgacttgatgatctgtacatccagactttcgagatcaaggatgtgaagactttgaacggagaacatctcggtcgtgccatcggacgtattgcaggcaaggacggaaagaccaagtttgcaatcgaaaatgccagccggacacgagtggtacttgcagaccagaagattcacattctcggtggattcaagaacattcacattgcccgagaggcaattgtcagcttgattctgggtagccctccggtaagacttgatcatataaatcttcaaaggaattcttctaacacaaaatagggcaaggtttatggcaaccttcggaccgtcgcctcgcgaatgaaggaacgcttctgattccacgactcatttatctcatctggcatggtgtgggcgttcaaggtgcatcaggtttaagctgtcttctttttctgatcttagaggcttgacgacgtttaacgtaaatatatcaatcaattcatggaaatttcattcatctcaattatgtttatgatcattgatcaaaaatgagccccacgcccaataagaaggccacgatctaccatgtcctacactctaatcctgcttcagggcgtggaacacctcctcgattccctcccgggtaacaatcacaatttgcaaaccatcgccaacctcgatatgtctctccacggcacttgtaaaggcatcctgtacaagcttcttggccgtgtccttatccagaggctcggcctttttggccacaagggcatgtccttctccgcttcctgggatgtattggttcttggagttgacttggttgtccaggaaaggcatgatcaagctggatgccgcaccggcagcccgacactgttcccgctcgtaagaacccaccgggtcgtagctgtacaaagctcccacgccttcctcatccagaccagccagaatagcatgtacgtagtacgggaagaaccgcttctcgtagaggatagtcgacaatcgctgtgcacatgctcccactgacatggttttcccatgttggtacttgtacatcttcaccacggtgtccagcttttccttgagagcgtttccatctgcggcgaaaccaacaacagaaagaatgatactagctccctcgccggtctcatcatcaccgccaatcttgaagactttgggtaccatgcgagagttgatattgtagcctgatgtagaacgagtgtcgccagcgaggatagcgtaatcagcacctgtgatgccgagggtggagccgccattatcggtgtaactagtgtaactgttagccagttttcctgcacagtgatcgagttgttccttacgggtagaacgagtgttgtttgacattagcggatgttggctcagagaaagagtatccgatagtcccagactggttacccatgagcgacgtcattttcggggatatggagcttgatcgggaggaaatatcagaacggcagctttataaaaaagactaaagggttggatgtagaggattctggagattgggcgttctggaggatggagagcaaagaagctgggtgtctgacgcgatgcggtagctgccttctattgattaggtaaggaatatccaagctccccgagagccctggagggctgtctctcgatacttacggcgcctcatttatttctgcatgttaagtttgacatactctcgttcgaaagataaacttgtccatatctctggatcttaccacagtgttatcctgatctccttcggtctcaacgcttatacctaggacgaattgcgacgtgatgcttggtcttggtgactatgagagcaacagtgaggatgaggtagaacagaatggtccttcacccaattctcaggtattttcagctccgaaacaacggcattggagagttgctgatttgaagcaacagcgtaacaaggatattccacctacaaccttacaagctagccaggacgaaggtaacatgcctcttaattctccgggactagctccgacgattggcgctgacgatttattcagatcataaaccgtccaaccaacaatcaaaagaggcacgcttttacatagccaccgattctgtcccagaaggaccggtccttggccccgcttctatcgacatggcgcccctctcggagaacaagcattcgacaagtggacgctcatctcccttttcggcttcacgtggactcgttcaagaccttactctccccccggttcccaatctagacattccaccatcacctcctgggtctcctaacccagccgcgaacgcgaaattcgagcatttcctcgcgctcaaaaaacaaggcgtacacttcaactcaaaattggccagctcgtcgtcgcttaagaatccaagcttgctgaagaaaatgatggaacatgccgggatcgatgagcaatcgcaatatgacacatcgttgccaaccgacttgtggaatccctccaatctaccgaaatggggtttcaaggaggaactcttgagaacccagcaaaatttccgtaaacaatcagaggagaaaaagacatcgggccagcgaagctcggttgattttgtcactggatctgcctgaagattcattcagcggcaaccggaccaagaataccaaccctacagtatgccagatctaccatggtctcgggtgcatcagatctttccggaaatttgagcactagagattatgacctcaaacggcggctccagcacataacttgattgcttcgaatattcggtagcgcagtatttgcctgccgggcatgggaacttccgttttggtatcctacgattcaagaaggagggctcttctataccttcaagattatgtgcccatcttggagaaacatactggtggtcgatccactgactccagaaagaggatcaacgataccctctcaattgacatagcgcacacttagactcgtgtacattatcatacttgtggatcatacattgcaacaatgatgcttgtttcaacatcctccgccgccgccaccaccaccactagatgccttctgtttgcgcttcgccttctcatacaaacttaaacaagaaaccaacaccattcgatcaaagtcttctccgtattccactctgatttgcagtttcccacctctgcccagtttcgcacctgaaaatacggccagaacatgctcggtgtgctcatccacgagcttatagttccgggcggtccatttagacggtgctgaatcctcaacgccaacggtgcgtgtacgcttccacaggaatgaccgtctcccgctctgagtttggtcagatccacactggactgtcatttcgaaccggtattttggtttgtggatgagttccttggtcatatcctcccactggacggcggtcacatcgtcggggtttccaatgcctattttgtaaccaccagacgacttccggaatttggagacggccacaattggggcctggctgctggtaccagcatggagagtaaggtcaggcttgttgagagtgaacacagatacttcgccgtagaacagaggctgatcatccgccgagttgatgtcgtagtgcctgtggaagagcctgttggtgatattatacacgcgtgaagggccattgtcaacggcaggggcaggggccgttgatccagcacgacttgaatcgggagaagacattagatttagaaataaaattatggatatcaattatttaaatattgtcaaatggagggaggtcacatcttttatacgagctttatacgttttaccagagaaggcgggattgacccttcggaagcgaatacgagcaccaaatcgggatggacagaagcacatgtatagacattggaagtgagtttattatagccaattatttgctttcatttttcttgaagatttgtattaaaggatataactactaaactagtataacagctgtagttatagtctacatcctcctggtgaacgcggagcttagtcagccgagctctccgtcagctcgactgcctaaggtaactagctccccatctacggagtatcgtcatcattctaccgtgctatccatctgttgtcttccctccttgtctgcaaaatacctccctttcgagcaccgttgaaactgtcatttatctccattcatcatgaaccactcacctgaagcttggggtcgcgtaggtggcacaactttcccattccttgctctgttgctaactatccgtccagcccaggaacgatgtctacggtgcctacgatcactcatatttgcagaccacaggtcccaaggcccatacctcatcccctgcagtgacgggaacgtcagtggtgggtgtcaagtttaatggcggagtcgttatagctaccgacaacctaggtatgccgttccattgtcacgttccgtttccttcgcattcccatctgacgtgatatgatttgtgaaaatatagcttcctacggatccctggctcgtttctccgatgtgaagcgtctgcgtactttcggcgataaggcaatggttggctttggcggtgacgtttccgacatgcaatacatcgaccgtctcctcgactccatggatatcaaggagaattactcgcctcacggcaacatgctcaacgccaagaacctgcacacgtaccttgcgaaggttttctacaaacgacgctctgagttcaacccgctttggaaccatgtgcttgtcgcaggcttcgatgcggagggagagcccttccttagttcggcagatttgctcgggacgacattctctgctcctcatctcgctacaggatttggtgctcatcttgcggtcccgatcctgcgccgcaagttccctgagggtacccccctcgaacaagtcagcaaggaagacgccgttgatgccttgaaggagtgcttgaaggttctgttctaccgcgatgcacgaagtaccgacaagtactcgatagccgtaatcacgaaggatgggattgatctgaaggaggatgagcagattcagggtcagagctgggcctttgccgagagaatcaggggatacggcgcccagactgcttagatcctaatttacgtttttcttttacatgtaatgcacacgggactacggatgcagagataattttgggtctaaataaccacaatgatcaattgcaatgactgagatgtgcaggtagttatatacaacttgaaccagtaccaactatatcattggtctactgcaagttcaagagagataaatttagagcttggccttaggcttgtcaaagaccacgcggttgacacaggatccgacgccctccagcgaaacctcgacattatcgccgtccttcagccacaaagcaggcttgcgacccatgcccacgccttggggtctgtaaagcagtcagtctatcaaattcaaatcatttgcttgctcatcagggtaactcacgttccagtgaagatgagatctccaggcaagagtgtagttccctgagacaggaaagctatcgtcttagcgacgccgaagatcatatccttagtggaggaagactggacagtctttccattcaacttggtcgagatagccaagttgttcggatcggcaatcagactggaagaaacgatgccaggaccaaacggagcccagccatcgaagcccttacccagtccccactggccaccaccccgcttgatctgccaatcgcggtgggagacatcgttaccgacagcatatcccaagacgtagtctagggccttgctctcggagacattattagcctctttgccgataacgacgaccagttcacactcgtaatccaggccctcgccctcctgggccagctggggcacggggatatcgtctacgggcccggaaaccgaagtaacgggcttgtagaacagcactggatacttggggataggcatgttcgcctccttggcgtgctgctcatagttgagacccaggcatcggactgtgccgatatccttacgggccaggggtgcgaggggcatgcgcacctctgccacctggtcggtgatccggtactggccaaagatgtcgccctggatgactctggccttggtggctttggcgatatcgctcactccggatgggaggatagcatcgccgtagtagatttggccatccttggccaggaagcggatgaggtgctattaggaaatcagcatttgatgcagtaattgatttaatgtatatttttattctaagatactcacagtaaaggtagacattggggagtatggaatatatggggaagttggaagttcgaggggagacggtgacgaagtgatagtaatccgccattcggccgggaaaggcctctcttgtcagcgggaaacatgtccagctccacccaatgatttccacgccttttccctcttcatataataatcgagattcgcaatggctcggttctccggtctccagagggacgtcctgtctctataccgcaaatgcctacgggagatccggaataagcctgaggtgggtttatcatcatctcgtccacgtcacttcagctgataacctattctattgtaggactccaggatcaatttcaggaactatgcccggtaaggctctgtcaattgcctatctgcctatctgcctatctccctgtcatttcctttcctttttctctccccaaacgggcattcccctagatatgtgcaatccggctgatacgggaatacagggctgagttccaaaaatatatcgcggtgaataagaaggactttaataccgtggaatatctcttgcgcaaaggtcatcgacagctcgagttatatgctaccccgggaatccgcaatatccgatgagcggatggggccaaccccagaatcttggttcctcggggtgcctacacgctagctttgtatgtttcgtctttcagcctcatatatttaccagtttactcattggaatagacttggagatctccagcatcgttggttccaggccgaattcctgcgaacatgttgaacattaacatgttgcgcgaaaggcaatatgtctgatatggtcgaggccttgctttggaagcattttgtataatagtatgtcatagtatatcatagaatgatcagtcattaaagctttgtcatgttctacctacataattagtttggttaactatgttgtatgtacgacatatattcgatgactactccgtaccggtactatcagcccttggaagtttcgagtaattaccaatcacacattattcatgctgtctaaaatattcatttatcagattattagagtagtagtattcagcatataatgtaacggaatacatagaatcaagtggttgtttctcgaagttggtggaagttgctggcggccggtcgaatgtgccatccgtttctggacgattccggaagtatagcaaccaccatcaactataacgaagcagaacatataaaatagcagatattccaggacaattagaacagaacacaatattcaagacaatctctcagatcatctatcatcattcttccaatcttcaatccaagaatcccaaactcatctacaatggccttcttcactactcaatccggccttgggcccctcttcgtcctcaatgagcacgagcttgccaaccaactcaagtctccccaatgttgcaagtccaaccagtgcaccaagtcaagccaatgcaccaagcccaaccagtgcaccaagtcaagccaatgcaccaagcccaaccaatgcaccaagatccaacagtgcaccaaaatccaaacacccacctccttcatgcccgcctttgacgtgcgcgagttgacgcacgcctaccgcctagacggcgaactgccaggcgtggaccagagcaacatcgagatcgaattcaccgatccccacacactcgtgatcaagggccacaccgaccgcgagtacatcagtgacgacaccaacaacggctcagcctcagccagctccagccgcagctcgtcagccgcaggctggcaccaagccaccgtcgaagacgaggacgcagcgtcgactgctagctccaccgacaccgctgcttccagcaatgcggtttcccacgctgccaaggacgaccagccgcacttctgggcgaaggagaggtcgatcggtgacttccagcgcactttcagcttcaccgcgcgcgtcgatcaggatgctgttcgcgctagtttgaagaacggggtcttgtcggttattgtgccgaaagaggctgcccctacgccgaagaagattcgcattctctgatttggaatcgaatcgagtggttttgctttggctttgaaagctatgcgcttgtataattgattgcattgggatctccgggtggcgtttcttttcccttccttgcatttttacttattttttacttctatgagtttactgatatgatctgattggaatcttgttacgataataaatctacatcgatgtttattatattgctatcccgtctgtagacatgtaatatgcacctgatggcacttgttaggctgtaagaacttacctcgctacttcgaccctgcgtctgttcttttaaatcaaagtcccttgcttgactagataaccttacttcgtatgcaggaatgaccaggaaaggcctgagccaccgaactagccacacggtgaaagactgaggtggtatccccacgcatgcattagactaaatggccaagaaaaccctaaaattacgaaacaacacatggcatacggcagacagaattcatggatttgtgtacgcaagaggagacactaattccatccaattccaaaagggtatacctaacaagactctatatccagatgtcccaaactcccgccaaagtaaaaaaaacacatcaactccaaaatgaacttttgacgccatgggcaaaagagacaaaatcaaaaataacgtccaagacaggaaacttaataaaatcattaccaaaattgtcgataaacagaagatggataaacagaagatggggaggtcatcatatgcacaaatctgtctggcgagcattcgtcaacctccggcggtagtcattgctccggcttcgaggccggcctcgcatcggctcggaaggagacaattcagcgtcaaggtctaggtcgtcctgcaagtagcctggggacgtgatggtgggcagcgggggagcttcaacgcttgatttcttgctccagatgcttcccagttggctgttggaccgagagagttgtgtagcgtactcttcattaatttgatattcagaggccgacctgcgaagtcgctccttcgtttcagtagtgtgctgttggtgactgagtggtgattctccggttatggtagaccccgtactagacgcaagatcaaacgattccatagacaatcgatctccatagaaaggccccttggtgaagccttgacactgtggaacataaaccagggaggtggatttgacttcgaggaacgagtcgcgcgaagaatattccgtgtatcggggcgcacacaacgttgaccgacgcgatcgcgatggagcgaggtgagtcgggtcgcttgaatcgtaccagcgagcagtggctggatgcagcgttgagtagttctccgactttgtcaccaaggtcagggaaggctgcaatttatcgctcgatcgattcggcctcgggatacagacgttctttgagctgtctgcaccacatgagctagatgtttgtgagtcagcagaactgtgagttcggctccgctgtacggagtggactgaagtggcagagctgtagccactgtcggacttgttgagggattgagaagtgctccgggaaagaccagcgtccagagcacccttttccaagtgaattcttgtatcgtcgaagaggagaattccttcatcttcggaatccccaggaaacagtgattttgtccgagggtggactgtgatagtaggagacttttcgaaagagaatggactgcctggaacatcgtccactttcttcaagtcgggcagggacgtaatctccagcgtggacttcctggttggccctatgacctctatgttctcaagcccaagtccagagcctggagcgccgggcccatccaaaggaattcggtcgctcggacatggggaggccgaaccatttacaactcgcaaagaccccaacttaagtgccccgagctgagtatatcgggcatccatcggactcgtcggacgcgccggagatggcaaacgcagcgatcgctgggtcgaaggcaatggccattgcaaaacggttacctccgtcggatcctcgatcggacattcaggctctccaatgggcgaagggacgcgtcggattgcgcctgttgttcgtcttgtggcaaccccgggtcgtgtcaggagcgatcgtcgacgcgttaatgagaatcgttggttgccaaccaagaagtgggtgttggaggatgtcgcatccccgatgtggttttcataaacagcgctgttgtgtctccgtaagggaattcgagtcgaactggcccgccttggtggctgctcagaaagaggcgagcgttgggaagatgcttcccaggcttccgattggtaggacgttcttctcgaagagctcgcgctcaacagggttggacgggtcggatgacgctgcgttggactctgctcatatataaacgttcgatcctcaatcggggtctcttcggacgactctgtttcaaaaagggtaggtgggatctcggctttcttgggatagctaccccttttctccacaggggcactggagatagtgttgccaacccaagggttttgccatcctattagccctgatctgaccgttggagagtctgattcccgttcagaactttggccgacatagaacttctttgtcaggggctttgaaaggcggttggaacggtgggtctcgtctttggctttgctcgaatgaatgttgcccatgacttcagaagcagatgcaattcagatatgctctggccagattcaactgggcatgcagcaggggcgagaatgatatacaattagaataagggcttggtgacagtatgatcactgttccccgcacgacgatagggtgacctagccagatggaatttccaagcttgtcccgatagagcttttcagattagatcgcaccccggactaccgacgccaagcaacgccgtgattgatcgcaggagacgtaatccgagccccaagctcgtgcaacggctgggttgggaattgagcgtacgattggcggctcagggttccccaacaatcccggagataatggggaggaccgcgtttcgaattgagtgcgatgcagaaaatggttggactggagagatggacggctaatgacggagagaattgaggtaacgtcgaaagcagatagcccttgggaaccggaaagtccccttcttatccaaagcaggatttgaggcgttcacaatctcagctgccggggaggtcagaccaggtgcccaggcgtagatcggaatcagcagatacacgatcggatcaacattaagattatagacagacaatttgcaaagaacagaaataaaaaaaataagaaaaattcacaaaaaaagagaatagtgggaatagaaattgggcaggatagtgtcactggggggaccacgatacataagaaggtggggagagaatcagacaaacgaagtgtatatgcaactaaacgctagaaacaaaagaagacgcaagcattcttttttttcgccactaaaagacttgtatacgcgcctttgcatcagatgaagctgcatgcagaggaatgcagaggacaaggaacatctccacgcgggacaggtacctcttctgccggaaccgggagagaaggatgtatctagtacgtgagcttagtatgtagaggcaatacattatgaaagtaccaggtacctcattgcacacgtagtatcccaacaactccattgttgctttcttctctttctatagccagtctgccgcaatcgtctctccttttcctctcatcttttccaatatcggatgtcttctcctctatctttgatttgatatacagtaacagtgggatcaagggcttttactcttgcgaaatccctaccctgaccacaccgcattcacagctgagcatctgcatccggcgctggtacggagtagctgacagcactctccccagcttcagccgcatggccgcatcttgctctacgttccccttcctggcgcagtcggagtttgaggtggcatgtcaagatcttgccgatcgatgcattgcagcccaaaatattggctggtccgccattcgactgctcacaaaggtatccctttttctgatgcatgaaccatctaaaccttatttggcccttgttttatatacgaaataagaatggaagaactgatgggaaatatggtttggatgaaactagccagagggaatcggcctcagaataacaaaatgtgtcaatgtgcccaacccgctagaagagccgctagaaccctcagccctggagaacctcgaagaatcacaggacgaggatccggtctgcagaattctagccccccaaaggacgtgtccacttgtcctgactcttcaccgcaggaagctctcgttcgcgccaaaccccatcccagcttacagatcgattatgacatcttgttgtcccccacatatcaagtccccgtcttgtacttcggcctcaggtggcacaaccacggcccactcggactagaagaagtctaccagtatgtcgtgccggaacgatacaggcaagaattgaagagtgtgggtgtaatgggtgggattagtatgggtgtaggtgcattctccgaacctcgtgacaagagctcatgtcttttttgttttttttttcttgtagtaccatcctggatctggcgccccgacatttttcgtccacccatgcaacaccgcggatgccatggcgaacattgcagacgcacagagcgtcactcccgggtcatatctcctcatttggcttggcctcgttggtcattgcgtgaacctgcacgttccacgcgagctttttgcttagcagtaccagccaataatcttgcatatgctggaaacgctggggaataaaaaaaatcaaaatgcaaatcgaagactccaagtctttcttggtccccagtagggtcttattcattagattactcctcatcggaggacgcgtccataggcacgtcgctgtcttcgtccatcggggcttcttcgttgtcgctttcctcttcacgcggtcgcttcacgccatggccctctccattggtatcggttgtgggtcgtggagggagtgcaccgggaggagcaccgaagatagacttctggaggtcggtcgtgacgggggctggcgcagtctcaactggcgcgacgtatgtgccccgaagtttggaaatgacattcgatgatcccttgccgtacacgattttctagacatccattgattgagcggggggttgcgatgaccgaagcgcaatgaaaacataccatctgtttgccgaaaaaatcgaatccttgtaaagcccggagtgcctgcgtactagcttggacatccctgaacacaatatgggcttggcctcgcattttgttggtcttcatgcaaacaacatcgagaacggtgccgtatgtggagaacaaggcatagagtgcggttcggagatcctgtttctgaattcttctgtcgggcaaatttgtgcagtagagtctaaaaattgttagcgccaatccgcgacaatctcctgtgcttggaagggcaagctcacgtctggttaggagcgccagtagcgacagccttgctgtcagcgcctccacgggcgggctgtgattttgaagccatttcttggatgattagaaatgggagagattctgccgtttgactgaaggagcaaatgagattgcgtatgggaaaacaaagctcaatcgcgtgtggtgtccattaccactcaaaacctcgacataaaagtagcttggggtcatgtgatgtacccacttactaagcaccgtcatcccccagctcccctcctgatcccgcaactacaacaatcaagtacacaagcacgacggtagagagatcctcctgtcgttattatcaatatgaccgctcctcaggttcaccatctcttccacgcaccaattgcagaccactcgttctcatccgataagaagacacttgctgtcgctcgggagaacaatgtggaactgtatcaacaatcaggcgacaagttcgcgctgagcgatgagctcaagggccacgagaagactgtcaccagcgttgatatcgctcccaacagtggccgaattgtcacttgctcacagggtatgttttggccaacctccttttactatactatatacaatacctaacggttgtatagaccgcaatgcctacgtttgggagcagacccctactggatggaagcctaccctggttcttctccgaatcaaccgtgccgcaacctttgtgcgctggtctccatcggagcagaagttcgccgtcggctccggcgctcgagtgattgcagtctgctactttgaggaggagaacgactggtggatctcgaagcacatcaagaagcctattcgcagcacgatcacaaccctggcatggcacccgaactccgtcctgctggcagccggatcgaccgattctcacgcccgagtcttctcgagcttcatcaagggcattgatacccgcccagagcccagtgcgtggggagagcgtcttcctttcaacaccatctgtggcgaatatctaaacgatactgctggttggattcagggtgttgccttctctcctagtggtaatgcgctggccttcactggacacgatagcagtgtgactatcgtgtacccgagcgctccagagcagcccccgcgggcgatgttgaacatcgctacccggttgctgccgcttaacagtcttatttggaacggcgagactgagatcattgcagctggacatgtaagtcattccttttcagtaatacgacttgcgctaaccgtacctaggactgtgagcccttccgtttccacggcgacgagaatggatggcaacttgctggctctctggagaataaggctagagaatccggaggtgcccgcgaggagtctgctttgaacatgttccggcagatggatctcaagggccaggcccaggcggacaccaagctcaagtccacacaccagaacactgtgcacaccatccgggtccacgaagaagccggcggggttgtgagcaccttcagcagtaagatcaccgtcctgaaaacttgagatgtacgagactaacatattattatagcgagcggtgtcgacggccgtgttgtcatttggaccgtctgatttgaactacgtttgaatgctgacctcagtccatggtaagtatggttatatagtattggatagaatttttcgagtacattctagtctctcgtgacatacacgtagttgtagatctatgtctgtagactgtatgttgtgctccccggtcgtaccttccaagattgatcgacataaaccgaccaatgaggaaatcgatgacataatagagttaccccggattctggtcacctctccacatcacgcggtcatgctctcttcctttaaagatggatttataccctccctcctaccaaattcagtatgttaagccatggctagcattttactccttcctttgctactatatatctgtttcctgagcttcgtctcagcccaaaacaagacgaaccatgtctcaaacgacctattcaactccctggaggagttatcccggctagtggatatttcatactgcgttggaacaacgggagtacagcagccatttcagtgcctcagccgctgcgatgagtttcctgatctagaactggtaaccgtgagtcatatccctagtcaactctaaaagacacacccactaacctaatccaacgatcccgtagacctggaacaccggcctcctcctctccgattcatgcggctacatggccctttcccacaccccctccgccaaacaaataatcctcgccttccgcggcacctactcaataacaaacaccataatcgacctatccgcctacccccaagcttacgtcccctaccctgaccccgaagaaaataccactaccatcccaattcccacaggacagcactgcgaaaactgcaccgtccacgccggcttcatgctctcatggctccagacccgaacaacaatcctcccccagctctccctcctacacaaaaaacacccagattacgccataacgctcgtcggccattccctcggcggcgctgtcgcagcgctagcaggcctcgagatgcgtctaaagggctgggatgcaacggtgacgacgtttggggagccgatggtcgggaacgaggcgttcgcggcattcctagacgagcaattcggactcggggatgggatagcgatacccccgcttgaaggggggatgcgttttcgtcgtgtgacacatgttggggatccggttcctatgctgccgcttgcggagtggggatatcggcctcatgctggggaggtttttattacgagggaggagctgccgccgcgtcgggaggatgtggtttattgtgttggtcgggaggatcctgggtgtattgccggtgatggaaatgagagggttttggtcaagttgtatcgggatttgaatgttcctgttgggttggttggttctagtagcgaggggtgtcggtcgagcggtggtggtatgtctgaggaacaggcagtcttggaacgtgcgtgttcagatcttcctggtcgcgaggatagattatcgcctctccgatgggattggtctcttataccggcgaggtatcggatttgggagcttttttacgctcatcgggattatttttggcgcattggtctttgtgttccagggggagatccaactggataaagtagtatatctatttattctgttggatgctggcgttggttgcttttttactattgatataccccatactgtacattatcaggtaccttgctttacgagaaactcctttctttctctgatatatatcacctatttctaagattacttcagaacaatcgcaagtggagcctttatcaaatcagaacagcggtataattatctcaatatcaacagggcatgaacataaaactagggcgcataactcatgctaggacagagaagaaaagcagcagatatacaaacacgccaaaaaggacaaatgaaacccatcagacaaaagaagagcaacaagaatgctgtgcaagaaaaaaaaatagtccctcaatacatatataaaaatactcaaccttcaaacctcatcaccgcccatgatccaaagacggcacaataaccggcccaaatttaaccacgttcccaagcgccccttcaccctgaaccataaagtccgccgccagactcaatttaccgaccgcggcaggcgggacatggccatatgaaggattaaccgcctcagggtcataagcgacaatagcgacgtagttccgacgtgccatgagcttgcggtactcacgaggctggccgttgacgtccgtctggaagatctccatcatgtcttccttggtgtcgctcacctggccggaggatctgtggccgttggcggggatgtagaggggcttgctgtggctgtgcaggagcttgatgatgtacgagggcggcggggtgttgacgacgggcgaggcgatgagttggtacattgtcttgtggtcggatgggtttgaggggtcgtggacgagacctgcgccgcagacgttgacggcgccggagaggaaggtcatacggattgatttttggtgcgcgatgccttggagtgtacggatgagatatgtgcgttcgaggtcctgggttgggttagtatgtatgtatggcttgagggtggatgttttgtgattcattggaaaagggacaaaccttcgactcgtgtgtccattggtcgcgtagctcgtccatcgagttgaattcgccaaatggactcaatataccacccatcagtccggatttacctacggctctctttaccgagtcaaagcctgagccgacgaactccttggcgccgaccaccccggctactgagctggttaccttgcctagtacgttgtatgcgccggtcacggctcgctttcctgttgcgacggtctggacgatgtgttctgctgtctctaggcgggggtagatgaggggcacggcgatcatccagatacagtgctgtacgctgggtggtagcattgcaaccttcgggaacagaccctggtacgtgggaccggccatgacttggtgtgggtttcgttctgatcggcaatctggtccgacgacgacgacgccgggaccgaggtatttaacaaagtgccagcctgtgccggttatagtgaagaggtccatgtcgttgctgacgttacggaggatgtcgagagttgtgtgatgctggaagaggagatacatctcgataccgatgcggccgatgttcttgaacatgttcgagaactgcatgtgctcgggatacgagccgaatccatcgaagctgtgggtatgtcagtgctgctcgtagactgttattgtatggggactcacatgtcatgatcatcgatctggcagacataaggaatctgcgcaaatgactcccttatgtggggttgatcgaagtggctggtgtagtaatggaagtacgcgtaagaaacatcctgctcgttagccgctgtccaaggcgcgttctttctagcctctttcccgctgatggtcaaccactgcttgagagacggaatctctttccacatgcgatccgcatagatctgaccacccagacataactgggcgtggaagcctccgatctcattgtgcttttgcatgatatccctccacatgtaaccgacgccacccagacgagcccgctcaccagcattaacattgagcgagaagtcatttccagaggtagcaatgaaccgccagttggtttcgtatcgaccagcgacaagaaactcgtagcgagtgcaaccaaggtgtgaggtgatggcgtatgtccatttagcaggacccgcatcgtccatctgcaagtcaatctcatacttgtagaatgtccagcgttgatgggcggcaatgttgattgccttcaactgtctcggatttggagacaggtctagactctgatgcatgtggattgtgggtggctgcgcggcatctgtcacaagcaggatagatcccaaccagactccacgttcgagatccatgttggtgtaacgcagataaggaccgaagtagacaccgttggttggagcgtttttgtaaagatccatgccactactcggaggaggcccagagaatccagacattatgggagactgcaggctttcgaagccaggggtcagaggcacacccggcgatgctagaggcttcccgaaagctgacagacccggagaaactagcgggtgggcggtatacacacttcccactggggacaagggcgtatcgttgagattaagcggcgtagggcccttcgggaactcccactgagttgactgtgtgggcaagtggatgtagtaatactgccccgagctgggatccatgtgggcaatccacccttccggaagaggtggtggagatgctggacctgcgccagagggccctggagaagtcacctggactgtctgatgatggaaaccggacaagtcattagcaacagacgcctgaggggattgttcctgtcctgtttgctgttgctgtctctggtcattcgcaaaagcgggatggtcctgcggcgacactgccggtgcaggggaagaggcttttgtagcagggttgggctggtttactaaggccgggtgcattattgcggctcctgctgctgctgttgctgctgttgctgccgccgctgcagcactgcttcgcttttcagcgggatacctattcgaagcagaaggaccggatacactcgagtaggcgggagggggagaggagctaaggcgcatccggtccatgtcttgttccaaagcgttcgggggaacccttcccggctgttcttgctgctgttgctgtagcccagatgcagggtgtatttgggatggtgatccgccgtatgaccctggtatctgaggcggtgggctgctatattgtcctggatgagcctggggttgcgggctgctatattgacccggatgaacctggggttgtggggtaccgtattggccaggatgcgcctgaggcggcggactactatattgacccggatggctagcagacggctgatgatcatcattgacgacctcaccaccctgataaaccgtaggcggcccatgagggttcgaacccggctgctcagtcggagtccacgggcgctgctgctgctgctgctgtgggacaatcggctgctgtcccgagtactgctctgctcgtctctgtgcagcgacgctatgcgacgactggataccctgcagagtcccggtgcccgcaattccagccgcggcatagcgggcctcgatatccgaggttggctgctggcccggtccgacgataggagtctccggcggcgggggcgagccacgctgggcgcgggttgtcgaggtagaactgatgcgattgagcgggccttgtgcggcctggagactggacgggggacgggctatagacgtagagctttggcgctgagggggcgggtagtattgttgacggtaatcatactggcttgtgtttgctggtggctctggtgggccgggtggttgttgttgactggccgggggtcgggggtacggtctcgcggctagggcttcgcggtctggcgcatcgtagctgggagattcgggcagcggctttggggctgcgcctcttctttcggcgagtgttgcgactcggggctcgcgaccgtcccgcggtcgcagcgatgttgggtattcgtttggactcacggagcccgagccggtgccaggaccagctggcggagacccgtatctgatgttgtcgtgatagcgctcgtttgaacttgaggggcgcatctgcggacgttgacgctcgtccgggtagggtagcggggcgtttggtgggggactggagcccgcggccgatgctggggatgatgagtcccgtttgttgatacgtagagggccgacagtgggtgactcttgtctggctgggcggtcgaggaaaagctcctccggatggagggcacggctgccactcatggtgccgtggtaaattgcggctgggcttgaagctgtagaagacagaattcagccaccgcaggatgcgaggtactcccaattacggagataagcgcgaagatcgttgggaacgggtggtagatgcggggtgggaaaactatttcatctattcataggaattgtccgagagtaagaggagaacagaaaaagaaaaggagaggatcagggagattatctgtagccgccaagttggcgagacgccgaccccgcaggtgatgagaattatcacaagttgctgccttgtggcctgctacagggatgtagtacgcagaaatcgaggcagagatctattgacatccagttcccatacattctaatctatggctcggcccgagcagttccatggaagaacggaatatcagattccacatgttcgtttatatacatacagtccatatccatcatcaatcatgctaacatacaaccctgatagtccccccaaaaagcgaatatgccctagtaagcgccaatgctctgtaaaaaagcaaaaaaataaaaacaaaagaaaactccactgtccaatcaaaacccgaaattaaccatctgaagtccctcctgagccatgaggtcagaccaatccacatccaatgtatgacccacatgcatgagtcgctccaactgccgctcatagacaatctggaggatggcacgagtcgttgctgcattgcggcccatgccgtcttcctcgtcttccatgctagtcatcaattccatcgccatcatcttcaatccactagccgatgccgtagcacccgctaggaacaaggggaagactaggaagtgtcgatcagcacgtcgagtgtgagtagtccgttcggccatgcgcaggatctctgttacgtggtggtcgatttctgcgtctgcggagaactcggactcgacgcgttgtccgggccacatgctgctgtaggagaagagttgacaaacatggtacaatgtagcagactagaaggagttagttttttcttcctttgaataaacgcaaaaagtagaaagaactgacctgctggatgatttcccgagatcgccgcgggaggttgtcctggtgttggtgtaggaaggcaacatcgggggattcccacagtctcccgaaagcctgacgcagatctcttaattcctgcgatctcttatcgaactccgcaaagggcaggctctgcttatcatgacgaagccgagcagccaagaacccaagttgagcagctagccggaatgtgtcgtggtacagacgcatgatcaccggtaagctctcatgctcgtcggagtagatcacactgtagccctctggggcggaagggtagagaagacattcagacccagggagcatctggtggtcgatgacggctcgtacaaactctcccgtccctgctccgctgaacagggcgtacaagtcaatgtggcatacccaccagaggataaatggatggggctcttggccatacttggcccgtcgaaggaaggcgatgtgaaggagacgagagatatggtgagaccatagattcgagccgtgtggctcggcggctgcgatctggggattgtaagtatgtagactgagaaattgcaattgcaaccgcttacctcgtagatcaggagcaggaagtgcgtaaggaacagtccgtcggaaaccaggtcatcgttgttccgtatactgacctggagcgaggggaaagcttgctgataatattgtagcgcatcgacattgtgacccgtgccgctgtgcgagagactaagggctgatacagccatcatagcgtgggaaagctattcttcctgttagcaggcatcattgagaacaagaatgcaatacccacaggagggaaacgagtggcttcctgctctaggaagtccatgctgagagtcataaagtgactatccgatccgcaagaatcatcaagcctatggtcgcgagggaacaactgccgccatacgacatgacggaaatgggaaaagatagtagaatcctggctttgctggtccaggcgcaggtccaagaaagtcatctcctccaccttcacatccggcgaaggaagagaagtgaaatttggagagagcgacagattgcagaaaggatccgagatctctgaggttggagagatcttcaaggtcttcccgttaaacggcgagcggcgagtgccatcttcaaaagtcttcaaaatgaccacattgggatcttcgtctctcacgtcgcccttggccgtgctcgtggggctactagccgcagagctcctacactcgctggtgggatttgatctagctcgctcgattgcatcgtctgcatactctggcagcgcggaaaaactgtctggtgtcatcacgacatggtacgtgccgggactaaaggcttctgctttcttttcccgctcttcgtcggaagtgagcaggtaaaagggcggaagggaatccctggaagagaaataatcggttctctcatcattggaacacggcgaagtgactactctagttagtatggactagaaaaaaaaaaacataaaaaaaggtacttacgatcccaaacgacatggccgtccgtcttgacatcggccatgcggcccatgatacgaggggtatcatcgcgaaaagccaggcgcgggcgataatcgcaagtatggcccagccgagtacattgctgtcaagagcatgagtaaatgtggattttagccaagcgtgaaagaatgcatacattacattgcgggtgtccttcatcacatttgactgaagaatgtgagtcagcaacgaaatcggagacacctgtgcaagttgtccaagtcacttaccctttcgactctgaaaacgaagaaaaacagacgaattagttaactgcttcctttttgaattaaaaaaacaaaacaaaaagagactcactcgacatgtcctaaaataaataagcttggattcccggttgagtcaaatatagagacgatcaagacgatcaagacgatcacttaccaacaaccggtacgagatcgtggaggcaagcggatgcgcggtggagcgatcaagaccttttcggacttggcaaaggcatcgaagagatcttccttgggggcaatgatgggtaatcgcaaaggaggtttcccagagactttgctccgtctgtgttgcatgaccagactggccgtcatgaggctgctaggatcagttgtaagtacgggctgaattgggagacttaggggacgtacggtatatcaattcaattgtcaaagatgaaagagagaaagctagagaatgagaagaatagggcgaatcaaagataaaggaaacaagaggttataataagatcgaaagggaagagaaaggctagatgtatggaaaatgccgtttatgggcgcaggtatttggacgggtggcgggaataaagggaaatccaatggggaaaaacagagaaaaatatataaataatgctgaaataattggattagcgcattattccattattctacaggtgaattatgtgggaatcagggaagaccagagagctaaggggaacagaaaacgcaggggaaaacgatcgaaccaaaagccaaaaaacaaggaaaaaacgcgaaaaagaaaggaaaaaaagtcaaaaccgaatggcatgcagatgccaaccatgtggacaggcgaaagtcgaacgttgctattaatatgagattacccaaagctattacggactaaggggaactaggggaactagaggaactagggcagagataggatggccagggaagagacaacctcgggaagtgcccaaggggctggctgaagccacgtcgaacgagaaacctccctttttttttatcggagccgaggaatgggctcaattaggtagctacttacgagctctggggggaaaaggaaggaaaacaacgagcaagtctcgatcggccgcgacccccggtctggatcgcattgagggagcgtgggaaatcgaagagatcacactttggcccattctcggaccagttgggcctctttgggacaagtcgcgatgacttttagacattttgggactctccgcattctaaacggacttggccgggaattaagcgagtggcgcagacttgagaccactcgcgacaatccaactcaatccaacttacccagtgctgcacctaggcggacttctattggcgcgattcctatgttggccctcgtatcgaatccttgtacgaaaaaaataagaaataagcatctttcatgatcgactggtaaataaccttggaagacaatgaaaaaaccacgtgggaatcttaattcgggaacgccaggacctcgtccaggagccgttgcactggtccggatcgctcgctggctctccactgacgaacacaaacgagaagcgtgtcaggcacacccgcttgggcatgcggactcagtttccggtacgccagaatcgcttctgcacgacccttacggatggcctcgacagacccgtctacttcccccgtgagaatcttgtccgcgagagcagtcaagggtgctgccatctggttaccggatgcctccggtgagacgatccacagatccactcgcgcaaagaacgcccggagctcatcgtagaccgtgctgacgacctgtcgtccaccctgttggaccacttgggccagtggaccagtcatctgttccacgtactttcccagcgctgtggttagtgttagcaaggtatgacgctagggggttcccacaattcggggtggaatttaggggctttaggggctttaggggctttaggggaccgaccttcacccgaaccggcggtggggttgaaacattgcaggagacattgtacacatgccgcaagggtgtcgtcctgggtcgagccgcgcccattccgcgagtctatctccatctggtcttgatcttgctcttgcatctcttccaccacccccggaataatctttaatgcgtccggcatgaagtcgaggtccttgcgggcctgtgcgatctcgcccattgcccgcagtccatgcggccggtacaggacgttagctcgcttcgcttcgcgaaccgtaatagtctgacatgcgttagcctcgattttgcatctcgtaaattataatcatgggggaaaagtggcgacatatcagcccataccttcatcaggtgactcagctccccattggcttgccacaacttctgagcttgcccactaaatttcactagtgccttgagcaccacttctttaccttcccacgtcttccccgccagagcccgctccaatacgggccaaaccaattgagccgtcgggaggtcaatctccacatcaagcgataaaaccgcttgcgcaatcgcccgggcggccgtgtgcttgatagcccagcggggggattccaaattgtccgaaacgagacccacaatctcgcgaatgtaaagcgacacggcacgcgatccaccaacgttatcttgccatgtcttctcaaactgctctttcacatgttcatcgccatcgtgcttacacatgaagacgaacggcaaggcgctcgccgcaaatgccatgaaccgatcgttggacagtttggacgccgagtacaggatctcgccggagatcactcgcggcgtggcatcctcggctgttagatagaggttcttggcatagtcaaacgtcttgagaacccgatcgtccgaagcgagtcgcagcagatagcccatggatgagcagtaggaggcgctgacggtgtcgtttcggtccaccacgtacttagtgaggataaggatgaatcgatctgcgtatgggcggaagagcaagcttttcatgctaagcagcactagaacgcggctacagcccaccttcgttggcaggcccacggccgaccgaagcacatcttcgagtctctgtgacagttcgtcaagattgctttcatccacgttgtcaatcagataccgctcaatcacctccatcatcggggatgtgcggatgctagacaggcgcattttgtcaatttcttgaccggtcagaccgtatttgtccgcattgaggtggacatagttgacagcctgtggttccagagagctcagagcactcaggaacttctccagcatattgggaacatatgggcgtagtaagctgccggggctcttcttaattattgacacaagagcaccaatggcatatccttgcacttcctccacgctggaatccagtcccttgtcgctcagaaggaagggaatagcactttggagtaaagtacctgcgcgcttctccgtgccgctggtctcgagtgtgcggataaccgaattggtaatggtttgacagagcttcagcgcagcagtgcggacagattccttgatatcatccagcagtttgaaagccttgctgtaaatctcatcaagatactgggcgtacttctccggacggcgaccttgaattaagtctgccacggcagcgcaacttgcttgccgaacacgccattctcgaccagctagaatgctcttgagaagatcctgcatgatatcatcaaagtgggtatcgatgacaacagtagggtccttgactagtgcttgccagatagtgttcatagacctttgcacgtttgggttgggatcgaaccggtaacggaaaagcttggggtaaatcttagggttcttcgccagatagccatcgacgctggaatcagaaaagatgctgctgattccgaagcgaccaaatgccgcacgatttgtccaaatagcattgtttgaagccagtgacatgaaccggtagaccagagtggggtctcccgcctcagcggccaggctcataatatccttgtaagtgttgacagacgacccttcaccagtggggagggctccaggctcaaatagctgggtgtctgcctcaatcttgccaccaccgagattgggaccagtcgaagtgaatgactcgaccaggtcttggaccaaatcgtctttcagggattggtcgccgatctcataaacaaggctgagcccgtgcgctccagtctcctgcactacctcgtcccggtttccaaggaggctgctgaaagtagcttggcacttacgcagccgctcctgcatctcctgcatgtgaccgcagttcttaactagcgacaacagccagattgcagatgccttgcgcagagatggcttgggcgcaatgcaatcggcaatgaccttgtcacagatgactgcaaataccgagcgcgggacgtctgagcgagggaattctgcatctacgtcgaaatcctggataagagcccgagaatcccaaccaacagcgacattgctcaaggcgtcacccacggtgaattgtacttcgggactgcggatttcatgtagactgtagagtgaactcaggaactcgccgaacaaggtattatccgggccaggccgggaaaaggtcagagtcaacaaccccagagagctgatgggggtttgattctcggttttggcgtcacgcgatagcttttccaaaattttcttccagccatcttctgtggtaatatcaagatgcaacacgcccgaaagacttagctgtccaatggcctcttgtgcagtcctttggagcagagtatcacgggaaacatctaaaatatcgaagagagtctcagtaaactgcttgatttgtgcttctggggctcggctccctagaccgcggtacgcaagtcgactcaacaaatacgagagcgccagaattgcaccacgggctcgcatgacctcttgaccaacagcagtattccacgattggatggtagcagttagttgggtaatgaaactctttagttgctcctccgagaaggcaggatgcgaaaccagaattccaaatgcccgtgcagtaataccctggttatcctggttgttgctgcaaataggctccatcaaggatgacgcacgcgagatcaagtgttgaacaacgtcattgggtgctagcgagcagatttccacgaaatgaataccacattgccgcaggccttcgcgctcgcccgttacaagaccttcgagggtgccagacaaaaatgccaaaacggactcctttgcagactctcgaatgtagtttctcacggctgaacgggcctccacgctagtggagagaagcacttccagcttatagtcccaatcttgttctagatctgcagcaactcccgaggctgagaacgcctcccagagcaatgtatttcggaggaatgagatggcaggcataaatgaacctttgtaggggccagaaaggagttgcgacgcggacaaagcctgaacattcaagtgttcctcttggccccctgagccaagcaggaagcgagtagcctcatcgaactttgggaagtcgaaccaggattcgtcttgaactggagctgccgatgaagctgaccatttcccatccttggcaggattaaggagtcggtaccagtaaggatgaagacctttccttccttcttcaacgatttcttgttgcctttctggacctcttgcaatggccatcaaatcaatccaacgggcgaccacatcaccaaacggcaagaatcggttcgcaaagcgcactgcggcatactgaacacctcgcacagcacggaaaccggtgtcaggttcaatatcgccaggctgcatgctcatcagacgaaccaagaatggccgcaattggtcctggaaggtcttgtcgtggctgtccaatgaagagttgagaatactccctagtgcctgatcgatgctgacgaatatctgagaactcgagtcatccgcactcaaggaagcaaagagccatcggaccaggtcgaattcgaagttctctacagcaccggcttgcaacgtaaagtcgaccttaggaaccatgataccaatactctcgtaggcaagacctcgcaagttgaggtctgttgtgggtagtttctgcccgctagctgccggactgggccatccttgggactgaatgaaatccctcagccctgcaataattatgggcgcgattttcttgagatcagacggtgcgcccatacggaccacccaagtagtaaacgtaaaaatctgggtcctcagtttcgacgcttgtaacccctgagaggatctagcagagtctgataggagcccatcttcaatgagcctcaatattcgctgggggtcagccgtagctttgatggacttccccagaaagacgagaagcttgacttggagcggaggccgcgcgggaggagcaccaccagcgccgaaatacaaatcatacaactcctgcacaacatcaggattctcaatatccacagcaaatcgcttcagagtctcatctccaagatcagcaaggcgggagttggcatcggcagaagcgattagtgaaggcaggaatcgttgtggatcttcaaaggcaccgcttccgatgaagcgaagagcggtgacttttgtctcggttaaattcaaaccaccatcggtagaagggttccatgtctcgtttgcgggagcacccttgttcaagaagttatactcgtctggggatagaccgggacatgttgaagtttccttggggccaggggtaagaagtaacaatttcgccagccaaaaggacaagaattgggaatcttcatctgagagaccgagtcgggctttcaggcgctgatcttcttcgctgcccttcgatggcagcttaagaagtggcaatagacgcaaaaccagattaaatacgatagcaccctgagtgggtgacgtcccgatcttcgagataccctggagcaagggcaataggatttcgactctggcttcggagccgaggcgatcaataccttgctgagcatagatgagatcaaaatgtctgatcaattgtgatttttgctccttgaactgcttcaacaatgctgccacaggcagctgaatagagggggctttgactcgggtgttgacatgctgacagaccgagatgattttgttgcgcacctccacgctatctgacccaagcttcagcaacaagggaggcagatatgttccaagcagtgactgcagcttctcatctgtatctgccatggcaattctaaattccaccttgcctatcagactcaactcgcgagcctcaggactctgtgagtccgccatgataaaagtgttgtagaagggtgattccaacaaggcatcaaattgacacgatagaaaaaacaccaagacgatcagatttataaatcaatcaatgatataggcaaccgcactcacgtcatgtccattcaagtgaacagtatggggggcgctccattgattagtcatgatttgattagtcattttccttggcagccgctcgggcatctatatctggcaggtgcgatactaaacgaagtcaacatgaatgagtcaacaataaattcatgtagctacatacgtatataagagaagaaaaagagggactagataagcaggtgaatattaagtctatatggcaacaaaacctagtatgttctaaatcaaagtgggagtctgtctctcaaatcctccattctttgatcagcagcttcgcctctcaagaaccgaccaatctccctttctgcctcagccgaagtactacagtcatccttccgcttgacattgccaaacagacattgccaaaggtcatccttcttcaccatctcacccacgtcgccgcgttgcatcaggtttgcgagagtggcatcttctagttccatcgagtttgcagattcaatagccgcttcagtaacattatcgccatcagcaggagatgtcaagagtgctgttttgacttgcttctctttctccatgatgtgggccaggcgtcgggttactgagatctcatagatggattcttccaccgtgccggagataaggtacatccatactgttgttggtctattttggccaatgcgatgcactcgagcaattgcctggagctcgatggcagtgttgatgagtggctcgcataaaaagacatgggttgcaacggtcaaattcagtccggatgattgtgctttgccatgcaaacaaaagcactcaatctagattataaatagtcagcgtactgcgtccaatgagggatggccgaggttgcttacagccgggtctgatttgaatttctcaatgccacccggagagtcaatactggtgctgactattccagagctttggaatacgctttgtaacctcgacaagaaattcccgtattgagagaaaatgaccgattttgcgccagggtcgtgttcccgcagccataggatgtgttgagctaaagtgtccatctttgtcccgtaagattcctccaactcaattttcttgatctcattgagatggccggagctgatgtcactgtagatcgcattctcggaatgaccctcatggtctaattcgacaaatgtcttttcctcttgtacaactagctcctgtggcttgtaggtgatctgatggagatcattacgcaccaatttcctcttgcacatcgggcaatttttgtgttgagcccaccatagtcgcaagcagatagtacagtatttgtgaccgcacacagtcaacacacctgcaccaaaaggtcagtctgcgtgtgaatttaaatccagacaatactcaccaacttcgaaggtcgattggcagataatgcattctcgaacattactgtcagagctagcatcatctcttaggtgaaggagatatcttgctttagacttgagagaagcaatctttgcttcgataataccctcttgctccaacatcagggtaaaagaagattcatctagcggcttgcctgcactttcctcatcgtatggggccaccgtatctgaaatctgctgcatgtgacgataatactccagtcgattgttcatggtatcgcggaaagttgcaatttctctactcattttgaccgatactttcagttgctcagcgatcatttgaccggcgtttttcagaaccgtttcgacgatcttatgttcagcacgagcacgcgaattgcccgaagtggcttgccactccagcgatgttataagtttgcgaagctcactgacaataccgcggagcgatccaagatcaggatcaggcataagctgactgcgagtttccatgatcttcagaaatagttgcggagagggcccctcacctcgttgggcctggacgattccggctttggtttcgtgggaaatgagagtattcttttgaccagtgagagcgtcatgacggtcgctgtacattgacctcaaagcctccatgtagacgtacatctcatcttgatgtcttgttgaccgctcatactcatcaccctctagctttgcatcttcttcctggtcaataagcgcctgagagaccagtccgaccatgacatctcgccatttcttgtattgctcagcatgcttgttaagagcgtcacaaagatcttcaaatttggtgagcagattgtatgactcgattcctttgctgtagagatggggaaccattttcgggatgatcacaaatttcttgtctcgtgccttaatcttgatttctttcatgtagcgctcgactttccgggagatatcagtcaacatctctttccgaatggcttttgcagcctcataggactcatcttcaagtttctcaagcgctctaaactcatccgaatctggctgtgttaaatttgtatcgctcttgatttggtaatatgcgttcgcagtgaagaacactgcaatatgctggacctcgagtgcagctcgaagcttcagtcgacactgaccgaggcggctgttcttgtctgcctcttcgtcctcttcgtcctcatcctcatcctgaatatcctggtctttgtcgtcggcagcgcctttggtcttcactaggcgcagttgctctctgctgtcttcaactagccgagtggcatagttcaatacttcctgccaaatgacgagggcttcttggcggcgttttgcattttctagaagctggcctcgtcgaagctgagataacaggagcgatcgttcttccgtacgtatagctgcctcgttggcctcagtcatggcttccagaacgtgagccacagttcgcaaagagccggagcctaacattcgatgttgaggcagaaaaacgtcaggatagaggcacgattggcggagtcttgttagccaggtacgcattttttcgacaactacagggtcttcggggtcccaattgcctccaaggggggctcccgaggcgtccaaaccgcattcttcacacattttctcaaaaagctgaccgtacctctgttcttctacagctggaaatggagtagtgatcacaatgcgcttttgaggtggtaggcgaatctcatccaatagctgacctttgctatgccgaagagcgattgtgttgatgatttttgccaagactggcccgaaaaacagacacaaccgtttccacaaaggggcggagaagcagaaaggctcataatgaagaaagattaagagaccaaacaggtcgtctatgtctctgcgcagtggggtaccagtcacaacccaagcattctctcgagggatcaagcgagctactttcgctgcattgctgactccactctcaatcatctgagcctcatccagacatacacgccaccatgagaggcgaatgaggggtgtcctcctctgttcaaatcgcttttcgtgccgtagagctcgctgtggagcttcattcgcatagtaaatttctttcgcgatgacattgtaggtggtcagaacaacatcggacttggcaagctctttgaccatcatatcgtcagttgcttctctccaatgcttgatgccagtgtaatgatgaacacgaagagtgggagcatgatctttcaactcttgtttccattgttcaagaatcgcgggtggtgtgatgatcaaagtggcaccaatatgtttcaacccgccgggatcagcttcgacatgttcttctcgcttattcagacttatcaacgcaatcacttcgactgttttgcccagccccatttcctctgccagtattccgcctttcagattatctgcggcatcgcgccactcggaaagatccgttgtcagaaccatgaaaagatgactgaagtagtagacctgtccatcggcatctcttgtggaattgaaagacactggcaggtcactttttggacgttctctaacgggaattatttcaccgtttggcccgacttctcttccttctctttgtaaaagccagcgaacagctcttctctggaatgggaatagcttgcatttcaaatcagggcatatgatattagtcgaactttccgtagccttgggaacgtgaacattcttgtagaattctcggggagaccatttttggacggttccgagcatttcatcgcgtgatttgcgcaggtctgtcaacacagacgggcgaacacatttttcctgcagcacatatcttgtaaaggcttccaggtctgctttccccaagcggttcaaacccggtgctttaatagaatccctccaaagaacaaccgtttcgagagtaaagcttgctccatctggtaaggcacgtaggtgcgcctggtagcaggaagtaggtacatctttgaagaactgatccacgtgagcaagtttgctggcggcctgaagttccctgaggagatcaaatagcctcaaatccttgcacggatataatagcaatttttcttcatcgagactagatagttccagctccatataattgggaccgccatcggccgactctggctgtggcgtagtgtccagatcttcatcgagaaactgaacgcttcgaacatttatgagtattggaacgcgggaggtggagaaatttggggcatgaggccttttgtattcgtgcctgctgggtttctgcagagggtaacggattagttgttttgcttcagagcgggatgtggcaaactactatgcagattgtcaaccgtgctaatggaatgtagcccagaggtactcctgtcattgacaccccattttcttgtgtcagactccttgggccgccccgcttggtcgtcttgcgccgcttggtgggacggtcatcgcattgctggaagagggggtatagagactcgagagtcgcgtctagaataacaatatgtcagtgctttgatttcgtcaagacaaccaggaaacatgattgatacctggtagtgtgatatcttctgcaacgacactcattttgaagacacagcctatcctgtcgccacaatgaagcgttgacaagaagagagaactttacatatgtatcggataatgcctggcacttgagacctttccccttccattttagtgctcacctcttgccgctttttgatcactgagtaaaactgagcacgtctctgagtatcccgacttgatcacgagccattacataatcaactgatctgctcactgagcatcacctgatcatcccgtgagcaccctgatccactcactggtcatcatctgagcactgtgatttgatcactgagtgctcaccgaccgacagctggtcgaatgtaacattcgaccagctgtaagcccagtgctcactgagtgttgtcgcgccggcgacctaagccttcctcagtcggacacttgcacctgcctcattcctcgaggaaagagcacccggtacacctggccacaacagctcccaccccgtaagtactaacactcttacaaaacaccacttctacagagcaccgctgacagaaacatgagcgatccagacgcagaccgcgccgctatgccgcggccaccatcccccgtgagagaccgccagcgccgcgagccccgctcgcccaaaactccccaaacccctactagggcgatttcattgccagcatcggagtcgtcaagatccgcttcacaagcctggagtcacagttctggcgtactctcggtcgccactaaactggagctcattcgaatttcaggaaaaaactgttgggcctgcaccacggccgacccccaagcctgccatgtgttgggaaaaagagacacccaagtgagtgtcgctggcactaactactcgagtagtatgtggctaaaaattactgtgtaggacaacctctgggcccacttgggccttatcaactattccctcaggtcattatcaaacgcgattctgctctgtgcctcgtgtcatggacaatttgatagagataatgacccgggtttccttcttgttccgactgacttggatttctttatcgaatttgagaaagccgacagaatccgaagacaggcgggtagatggcctcccggccgacaaatgccaacaagtggcatgtacaaagaatacctcgagagctcgggcaagggggatgcggggtataccccaatgtttctgaaacattacctacttgcagggtctggagtgacccctgaaatgctccgattgacagcacccaagtactggcaaggggcaccggccgcagcactgcggcgctgcatcatggccctcgggagtggcagaatcgtggctctcggccaccaagttacacaacttgagacgctgagaaatctttatttctctcccattgaaggagcgtcggcaatcaatgtccatagttgcgatctggagccccagctagaccctccacagttccaagatcaaccggcccaaaaccctgatttggaagaacccaaatccgaaccagactccgaagaccaagactctgaccccgagtccgaccatgatacatacgggccccactcaaaagagccggatttcaatccaaacagacagcatgataaccggaagcggcagggaaagggtaggaaccagcagggctctaggaaacaggcgaagcatgcaccaggtgcgaccagacatgctaccggggagaattgggccttaggccccagcgcaacaacgcaggatgccatattgcgctattctccaatcttcgcccgcggatagagccatccgcctccctcctccctcccaatgtcatccgcctctcactgccatccgcctcccaatgtcatctgcgcacctaatgtcatccgcagcccactgtcatccacctcccactgtcaaccgtctcccactggtatacgcagcccctgttatccatatcacaatgtcatccgcagcccactgtcatcctactcccactattatctgcagtcaatgtcatccgcagcccactgttatccgtatcacaatattatccgcagtctatgttgtccgcagcccatgttatccgcagcctatgttatccagacggatttctgacttgctttttgctagttgatctcatgggaatgagtatgagcaatggtcaggcttcaaattgaatttgtttcggggcagactagtgtctaccccgcactttttgcaagtggagaacatgtaacttagtaaattatactacagtctcacagcaaaagttttagcaacactgacaatgtcttcaacccggatcggcccgcgaaggaccctggccccacctagataccgccttcctatttaacctacaccgccatacgatacgcggtataggctccattccatatagcgcgtatatctcgcgtttctctctctaattccttgcttgatactggtagcaacagcgcagcaggcatgagataaattggagctacggcacttagagcatctctctgagacaatgccacaccgggtggaggctatcatcgagagccaggggtggtatacagcatattagattccatagtatgaatttatggaggttttagaccggcagtaacttacataatcaagggggtgtggggccaggcgttgttaacacttttgcgtagtcactgtaattggaaccctaaaccactgtatcgccgtcggatcggaactgaccgatacgaaggtcaagcagctgaggccgtcgcgttgataactccctctttcattcctgtgttgtaaattaggaacaagctcaccagttcggaggatagtatcacgggctgctgcccgaagtgaagagagatcaggttatggtgtatacttctgtggtaacttccctctgttccttttgaagaagactaatcagaagccctatatctagcctgttccgctttgtatataatgttgtaaagtaatgattcgtgtggttactagctgagccgttagaacaacgaacgaatggcaattcctctcctactacattctagttattagaggctatatattagtaaagatatagtaaaaagaataagaacgaatttacttacctggtggttgaattttccgtagaccatttcgcaggtagcgtctgcttttttacaagcttttctctccaaaaatttctgtcgaagagcatcgtagaaactaaatagttgttagctactaataaaatattagtaaaataggtcgcatacgctaccgcttcacgttagggttgcgaatattggtatgactgtcgagcatccctctttatagagaacatacgccctacaagctcttcattaacctctgtatgggagaggttacggagatagtcgttaagatgaacacagtgcttcatgccggaatagtaagatgctgtcttcgtgacttggcaaccaaggaaggagcagtaaatatcactttttccgccatcacgcctactagcgtactggacctagtaaaatagttaataactagtataatatcgatgattatataacaacttactagattaagtgcatttttcttctcttatgaagagagatgtcggagattaaccacatatgcatagcctttcggatgagtacgcggatattctggaaggagaggtacatattcaatctctgtagtagatattgcgtcgtgggtagcttctgttaggggagttggttcatcttccgttccctatttgaaaaatattagtaacaaaccagtaggaaactagtaaatttcttcaaaaacatacctcgtattcgttgcgctcatgcaggatccgatcatcggatgcattgtaaagctcgacatctgcctctgcaggctcgtctggttcaggaataggctcggcctttataagctcttcaagcttatgatagcggtgtttccaccaggtagattgataatgcgccatggtaactactagtaaacgaattggaacaatggtttgtaagtagttatacgtgcatatccaaagatatatatattcgatgtagagttatttatcagtaattaggtagtaaacaactagtaaataactagtatacaagaatgtatcccttgtaaatataccacatatttcataccaaaacgggatgatctaatcaaagataccgtacatttccagaccaaacagcatttacataagcctaaactaggggtatcaacgtgagcattgaccgcctgaccaacgtgaggtctcaggcgggcccacatgacctggtctctcccggacgatacctgaggcggaagacacctgaggcatgcggaaggatgcggccggattatataagagacggctgtgtatgatcacatgatccataaccttattagaggccggaaactccattcatacttagattcctcaagtatcttaataacagcattattccttatcgatatcattatgactttagtattagacctttatatttaagatacttcctctatgttggtaatttgaggggtggtgcctctaaattatcgtattataagtacaggcccgttcaacacagcgctgtacggtaagattggaagaaggcttggcatttattcggctgaaatgcaggaactcctcaggagatcgcatgatcgagatcaagatcggccacgtttcccctcttccataaattaatagatcagattgcacctttattatacgcaatcttcctcgcttagagattgtattgttacattcctttatgctaatctcttgttattacgttattgatgttgtttgttattaactattattgtaacattgttattaatgctcaatttgagcctcgattgcttaaatactttggaagccaatttcgaatgttgctgtatcattgcagacctggtcctcctagaagcaagcggtcctcccttgtgtccaatggattatggatctctattccagtctcactaaccttcaaagttcaggctcagtttcaacagctatgctatgggctacataatcgtccttgcatttctgatagatttccttgatacagtgataaggtgcacttcagtatagtatatatacgttatacaaattttaaagcactggaattcattttgttttattaataatagtaatggcagtttttactagacgatacggtttctgcctaatgaaaaaaaaaaaaaaaaccataacaaataaacagacgagtgcattcctcgggattatacctgggggtgtgttggatatggtggtcacctgaccatcagcccggtacggcaggcaccaacccccataactagatagttaggcattctgccctttaggaattgacaactctctccctcttcaatcgcatcactacactgtagtcgcatcagtatataatccagtagtatcctggactccggtagtaggcttgagtgaatacagaccggcgcgtgttgacggagtcacgatggaacctatggtctctgtggccatggcaagaggactaaacccagcggctacagcgaccgcagagccagtggatgaggccccgggagtctgcttagtattagcacaaaagaatggcatctttatcctctatcttcccaacatacggcgacagagtctgaccaccgtgagcagaccaaccgggcatcatcatggtcattttcataccagcaaattcctagaacaacgtcaatccaataaacttccttattaaaccgaacatatactaacagtcatgttagcctttcccaaaataatcaagccagcatcaatcagccgctgagtgatagctccgttctttgacgccttggctcctacgaacgcatatgacccagctgtggtgctcatgccaagctccgatgctgtgacaaagcaatctttcagaactatgggaattccatgaaaaggaccccaggtttgtctggcgctcctcatcacgagccttggcggttgcgaggactttgtcccgtggggcaggagagattagcgcattgagtgcaggctcatagcgatctatttgtgccaaatactcttccacgtcctgagcgctcgtggtcttgttctcatcgagtaggcgctgcaggtcgaccgcattggtcgtgaggacgttgatggtcatttctgcgctggaacttgagattcaggtaaggggcaaattttgttactagtgcctttgttggtgatattaattgtagcatcgtgtgagtacgtatatatagatcctgctgcctgattgcggagcgaagcgaagcaattatatcgcattatttattctggtagccttaagggtagttactgataacatattgatacttcgagattaccgaaacgttcacccgttgtcaccgatggaggcaacatctttgtatcaaagccgctcgagaaagcaactcatctagctcccacattgtagcttgcaactgtgtggatagcaagtggtgaaacttagtggctaaagtaggacacacagcaattgatcaagtcccaggcaccagaaatgggactggaattttctttcaacatactagtagggatctttcgatctggttgcagttcggttgatctgaggcgctggccccgcacgggagcccgatggacgacaacttgaggatcgttgaatttacattaactagttaattgagtatcattgacagactacacatagaatatgaggacctgtagaattgacgacgaaaatgaccgctttcaacgctagaaaaggatacgattgtcacgccgcttgaccaaaaatttctctcgtgtctgatcagatatataagaccttttgatgcctagagtcagtgccaatacaaccaaatcaggaaataataggatatttgagcaggtacagatgaaaggaagttgaatatagactcgaaaattagcccgctacgtaactgcatacatggagcaaccaactaggaactcgcctagatattattccgtaaattggcgaatccaaaaccagaatatgcagtcacaattagataagaatcttgaaaatatgttactattcctgtctatgaaccataataaccggttggggcagtaatgagtatgacgattaagaatgacgtcgtgctatgttagacagcgttcaacctcaacataaatagtgcctgtttccggcgatatagaacttttcctatactcagcaaaccaagcaaaacttactacaatcttaaaccaatttttatcttctaatcttctatcttcaatatggataccgtcaaggttggtggattttctcacacctaccctaacacaaactcacatggatacagaacgccgccaactatgttgccgagaccgtgcagggaactggcgctgaggcttccaaggagaccaacaagcaagtcgcaaaggatgacgatgccaagctgagcactcgtgccgccgctgcgaaggatgctcttgtcgacaagaaggatgagaagtctcacgatgttaaggccgatgttcacaagggtaagttcatacacctgatacctccatagtcagttacttacaattttgcagaacaagttaagcatcaaaactaagggatattgtttggtatgggtcgatgttacagtaccaattgctctcccctaatcccgcgggtcgggtacgaggcatatgttcatagtactagtagaagaatacgcttgtttttgagtggaggatgctgttccgccaatcacattaaatgaataccctacttatttcatttcaacgaattggtgctttaataggtgctttaataaccggctgcaagttattttcttgcccgaacttcagctttcaccactataggatttatactatttgtactatgtgtctatacttatttattctactgatagcttggaaagcatggttgaagatgcatgtcggcagttgatcgtttaccaatataattctcttcaaacagtcttcacacaatatatttctatatgttgcgggcttattgctcgcgtctgaaaatctatatcgatgatacctattctgaattcggcttattatttcgcgagtgaaactcacgttcctaggattatatccggcccaaggatctatagtatggtttctaggcacgctcttggtcgttcctaggaatcggactcgtagtatttctagaatgtacgatcattatatcgcacatctcaaaagatcgatcgattagtggtcatctggacaagtaggatagcttatgacgtaatgtctataacggcctttcagtatcccttggcagtgatatggttcgatgacatcatggaaaaattcgatctaccgccaagagccatcgggctgtagaaactcccattggacactgccttggaaatcaccctcgggctctcttgctgtgtaccgaatttgatattatttctaaccccttgagaaagatgttctcctccaaacgcctgaccgctggattttcactatggccgcgtccgaaggtgctgctgtccagtcacactatagattggcccaggaacgggaattctacaagtaagacctttttcatcctggatcgcgtccccttgtcctccacaggtgatacagatactgactgatatggcattggggcagatatgttccgcgcgaactttccgcatcgcattatgccccctttgatcatgccagcgagaaaacgttcatcccgcaaccgtcgcgggattcggccatgacctccttcgcccagctaggcgtcatgcgtctaggcacccgacgagccatgatttctctattcgataaaacccaccaacatgtcgttgcagaggcaactcggacattgggactaatcggtgggagaatccgagacgaacacgaccggcttcggctaggttgctgtgtgctcccgaaagagaggggcatttgccagcacgtcgaagatttaccctctaaggaatattcagaagccggcgaggtcctcgaatctcgttcgctggttattttggatatgacgcaggacgaacggttcaggtcaagtcaactgccgcacgcgttgtctgatgtgcgcttctatgctgcagtgcctatcgtgagccctaaagggttcacgattggtgcctacagtgtgatggaccacgagccaaggacctcgggtcccgatcaacatgatctgcagtttatgaaggacatggctgcaacgatcatggaacacctggccatggatcactccactcgcaaaagtcgccaggcggaacggatgatcctcggactgggaagtttcgttgagggcaggtcgacgcttcgcggatcgtggcgagaagccaatgcacagtatgtcgcctccgaacagtccggggagaccaccgagggtcaattgaatattcagcaacagaatctgcaacaggtcaccaaggaaaagattgagaaggaccttgtcatccgccagcattctagggttcctaccaatgattccgcatcgaaaagtgatagcaatactagaggcagacaacagccgagtgtagaggtcaacaaagcgaatgggtcggttcgaagcgtccttgcgggcgaaagtctacaggatgactctcttccgaccggcatcaaacacgttttctcgcgcgcggccaacttgatcagggagtcgattagagctgagggagtcatgttcctcgatgcgaatagcaaccgttttgggagtctcgtcaaacatagccggaaggtttctggccccagcttaaaaagtccgacatcgagtagtgacgaaagtaccgattctgcgtcttcccaacgcaactataccaagggtaaccagaagggtgagaagaacaggaatcttgtgtctgaatgcatgggcttttcgagctcgagggtgtcgagcataaacgaccagacgagggccggtcaagcagttgtggttccagagcctctgttcagctcgttgatccggcgatacccccacggtaaaatcttcacttacaacgccaatggaatggtttccgaagatagcgatccctcacggaatctgtccgagcctgatcacgtcccgacttccggggcgcctcgctccaaagaccaatccctcgccagtaaacggcgacgcaagccaacattccaacaagatgccaatagtctgataaaaatcttcggtgatgccagaaatattttgcttctacccatatgggactcggaaagaaaccgatggtatgccggaacactagtgtggacgaacgatccggagcgcgttttcaccattgaaaatgagctcgtgtacatctctgcttttgttaatagtatcatggccgaaattcgtcgactcgacgtggaggtggcggacaaggctaaaaccaaccttgtcagcagcatcacccacgagcttcggaatccactgcatggaatactgggcacggcagacattctgagtgacaccgccatgaatgctctgcagcatggtatggtccataccatagagtcgtgtggtcgcaccctccttgataccatcaacagtctgcttgatctcacgttcatcgacaagtatcagaagaaacggtctcgcatgagtgggaagccgcgagagaatcaatcgagtttaccggccacttcgaccaaggagggtcgcatgcaaagcaaagaccgtggcgagaatatttctttctcccacgtcaaactggacgcgattctcgaggaggtcacggagtgtgtgttcgctggatacagcttttacaatcatcccgaggcgccgcctccagccttggccaatctttcttcgcggtgggctggtccagcgagcacgtcggatcaggttggccctcgagctagccaagtcacgatcattttcgacatccagccagatacagaatgggacttctggacacatgctggtgcttggcgtcgcatactgatgaatgttttcggtaatgcgctcaagtacacaccctcaggctacatctaccttgggttgaagtcatcccagagggacacagagtctggtggagaagtgccgaatgatcaaggagaggaatttgaggttactcttacagtgaaggacaccgggaagggtattgggcccgaatatttgcaaagcgaccttttcactccgtttcaacaagaggattcgcttgcgtctgggagcggactaggactgagcattgttcgccaggctgttggattgctcggcggctcaatcgaaattgaatccacaaagggagttggcactcagctctcgattcggacaccactcaccccgtcatctggtccagacacttcgtcaaccggctctacgtttagttcaccacggaaacatactcagggcaaaacaatcggactcctagggttcgggtcatctctccgctctcaacgagacatcgtcttgtactcatctttggagcggctgtgtcgggactggtttgatatggaggtgacaagcgtatcgtccctagagggcgaaaacgtctcctttgacttttacttggctgtgcagacggaattagactctgagcatgttgaaggaagaaacctgttcaattttaaaccaggtctcaccaacggggatggtcgcagctcaccggttgtggtaatttgtcaatcacccgaggaagcacacagaatgttcgttgcagccaagaaccggggcgaaacgcctctcttcgagtttattagccagccatgtggaccccggaaactggctcgggcattggatatttgtatcaaacgacaactcgaccaacaatctggccggcctaatactgatgagccgactcgctgggtagaaatgcctgagtcctcatatctaccattagacattgcagctagtgacccacccaaagataggatgaagatcggtaagcgaccaacaacggagacgatgcgcagtccagaaagtcggatttctcgatccccgtctcacaagggaaatttggaagacgatgcacatgccgcccagccgacctcgccttctaagatagaggcggaaccagagacccccggaccatccgtccttctggttgatgataatcatgtgaacctccaattgctttgtgcctacacaaagaaggacaattatcattacatgacagccaagaatggggaagaggcagttgaagtatataaagcacaccacgggaagtttcgggttgttgtcattggtatgttcaaagttcgaacttttctttcctggatttggtttgatgctgatcaattagacatctcaatgccagtcatggatggccttgaagcgtcccgacaaatacgtcgcttagagaaaggctatcgagccaagatgaccgaatcggaacaacaaacaacgccccccacagtcatcgccgctttgactgggctcgacaatgttgaagcccagaaggaggcatttggttctggcgtcgacactttccttgttaagccagtcaagcgccgagatttgcaggccattctacggcgaatgaacgtagagtgagctaattagcaccactttattttgtgttgtcctcacttaactgcttgaggcccggggcctcgatgaaaatacaggctgttatctcaagccgagggaaaaggtattacactagcagacaccctttcggaaggataattctaatggagtagtctagcttatccctctatgaagcgaaatccgattctgccaggtcaagagtggctagacgtttacgaagatctccacattccgcaaaggcctcgatcattcatctcggtaccgactttctcagcattctagatacctacccagagtttatcaagattttacagcaactggtcagttattctttctctaccaattccaattcgaacacaacttcgaatttccacaaccataacaacctagaacgtctgtatagatctcaccgtcggttcaatcaacctagaccaagcaccccttgaagctagtgacgacgacgatagattcgattacgaccctatcgtcagtctctcagtatctagagagatagaatagaaaagtaagagaaagtgaggaagagcagcgaagtaggttattggggcgctaacccaaaaaaggcaacactaacttgaaaaggcaattcacaggtccgccgtttagttacatggtcaatttgatactaacaagattagattagcgcgaaatattccctcacaaaagaagcgtaatatctccgagaaagagatgaccactcagattacaataagagagacctcaaagagccgtaaccctctcatcctggcaaaacgggcatgcagtgaagtactctgccatgtccacctggatctgccatttcgcaaagcaagacaaacaagagaaagactggacgatacggacccttgtggatgcagactggggcaaccacctctgcgagagaaggacgagatcggtagcaaggccgggggcttcttcaagcagtttctcgaatcccttcttctcgcgcagctccctccggtgtatctgacaaaccgctactaccacatcccgaagacctcgatccaactttggtgttgttttgtatgcctggaaagcagcaaccaagaattcaaccgagtcccagtgatcttgagcgagagtgacgaatgttagctttgcttgaactttgagatattccacctcgaatttgtcggcaatggagtatactttgacgttgaacaacaggggacacatttggtgctcgggttcgttgatgtcgtagtgtagtccgtagaaggagcgtatcatggcttccacgacgcgtggatgctcgtcctttatttcgaatacatgagcatcctcgtcgctctcctgtatcattaaagtcagctgggcgcgtggataatgaagggcttgggctttggaaacatacactggagagatcagcgaaatgtctgcagaaagtctcagatctgctgcagactacgattcggtgcacgctcaaaacttggtcagcggtgtagattgtgagatcggagaagatgcctgtacggtggaaactgtcttctgtcagttccctcattcatacaatgtgtagactcaagaacttactttccaagtcgatggacaaaccgatcagtgccctcgacgctgttggaagtgagttccatcgcgaaggcgtgttgtggctagctttgatgcgaaaggaacgcgaagggaaatatgtgaagaggaaaggtaacgttggaaggattcagacctttttgggtaacaacgataagtggtgtagcttttgagcctcagcttgcaaccttcaaaaggcaggcacagcttgttactgtatctagtttagacatatagtaactaaaccctacgcgtcttcggctacggagatttacacccctcatgtattccgtgggacttgtcaaatggcaatgagagccacgacttcagaaacgtccacgagaaagtccggttttgttgtttaatgcagacctacatggacctcatacatatggtaatgtcatggtccctgtggtaggtgaagcagcatatgctacggcaccctctgcctgcgctgtctcttgagctacggtgaaatggtggtcagagagatggggaggagagaagaagaagagaagaagagaaatggggggaggaccccttttataccccaaacccacgtgccttcctcgagtgcgacaggtccctcgcatcttcctgtcaatggcacatggcaccttccagtttacattgtttgccttttttgtttatacggggaacttccaaggtgtaggaaggagccatgaagccaatatcacattatgctaattccttgtagtgcaattttaagtaaacactatagctgagaatgcaccttcatattatgccattttctctagtttacaagagctccaggtccctttccaagtatagccctcacactgtctctcccagtatccctatgatcttgtggagaagaagccgaggtcttgctatcagggtcggtgtcatatacaacggtaccattgactgcatgaacagatcgatagtatggccgcccattcatctcaccttcgaagacattgctggtgtcaccccaagagcttgagtttccaccagtgacggatttatactgcgccgtgccagattgacttgtgtgtaggtatgatggccccgaggtcaaggtgtaagtagaaataccgagacctcctgttgcctcgtaatcaagacccctcttcatccaagagtcaatcgtcatcccactcgaggtgatgccataagttgcattgacagccagggggtactgaaacgcaatgctgtttgagatgggtgtgtctccgagctcggtgatggtattattgccagttgtaatttgtctgttaaattgactgtatccttgctggttgaggagaccgtggttggagaaggatagtgtctgtgaccacgagtacagagaagaggatgctctgaaaactcgctcgacaaccacagagtacgacaaggaatcatttccgccggtctcattgtagataagattccgagtcacagcaaacataggcaagggagcatccaccgtaggtccatttttgtcaagagtggcatttcccttagaggctgacctgtcgtcatcgatatatatgaagatatttcctgtgacaacccaatatgagccgacagtgttggcaaatgtggccttcccatctgccgagacatccagaccagtcacccggatctcaaacgagtgctgctttccgtcttgaatcatggggagaaatggggaaatatcaatctccggctgtcgaagatcaaatgcatcagtgccaacaaccggacgccagaatcccggagccacgcctcccgtaaagataatagggaatggccagacaaggccggcaaggatcccatcgatatagagctgaacttcacgaaaaggagtgtacccatatagcccaccgacagtgctttcaaagtcttgggtatcttcagaaaagacattggaccaccagaactcttcttctgattgtccacatgccgatattgacacaacagcacgcgatgccgcagcagggatctcgtacatgactgttgtgttgtctgtgggaagctggaatgcacttggagagtttgatgccgactttttggccgagattggaagaatcatatccgcagttttgacattgtgttctccagagaagtgcgcggttagcgtggcattgaacgaaccggtataaatgtcgttgatgatatttcccaagtcaaatatcagcttctggggactcttccatagtgaattatactgtgacatctctttgacataagtccagacgatcccattgattgtcggctctgccgttgaagtccggaacacttcattgtctccgaggtacatgagtgccaggcggtcaaattgcttcccccgggaggtgactgtgagattgattcgtacagtatcaaagtcgcagtttggaggctcatagtcgcctaaatagttgcaatattagactacaagtagaagtaactctcgagacctcttaccaacaaacggtgctccataactggctccaaaaacatgatccatgagcaatatgtcgacatcgcagttgccgtttccactggaatcgagcgatattggctgatatagctggaaaaactcctgcaaaccagtagagctaggtgcctgcgatgaaacgccagcaatggactgtaatccgcttcggagcgaggaagccgatgggagatgccccaaaagcaacaacccacatatggcgaacagaaccataataactagtaatccaaagcttggattttctcttcgcaatttgctgcgggtgtcgtctacccttatttttaaatcgtggtggtcaatagaccgcacagtgtccgcagttgtgtaagcttcttggggctccaatgcttcttgactgagtaccgacctgcgatgcgatttaaaaacattgaaaaatgcgaccgcaatgcagaaaagaataataaataacaaccatgcagctagctgcgtaaaacaatactccattgggaattgggggtccgttagcggttgaaacgagtgccctggaggaactagcatgttagctccgcccgtgtgagccagttaggatattagattctatccaagatggtgccaggctaaaggctatgtaaccttggaagtgactcttgcgatgcaatatatgaaggatgacgttgctgaagataagatgcataaagaggggaaggtgcggcggagttccgacgcaagcccagggctagctatgtaaccctaatatcactattcatacggagtaatgaacggttatcagtccgaatattgatagacctcaatgcttcgaccttgactgttaatgtcatggatatttctcgggaggtaaagtcttcaagaaagttgtattttgcaacaagataacattattggctaatttgacagctgtcacttaggtagaccattgtggtcatttttgagttgagcaaataccaatctcggcacagcagtctatgggaagctatatagatgaaaataattgaatccaaccccaagaatgacagaatctggccgcccaccaggcaccaatcacatatgtgtacggctttggggcattcaacttctggtccatcaacacccgccactggggccctcagatgcggagagaaaggatggccgagataccctgaaaaacgcgatcggagcaatcatagtgcacatccatccattgccgatcgcattgagcatgggttgagtgacgacggctctagtgcatgcaaggatatttcgcacaaaatttgccacggcaacaccgctagatgctttcttgggagtgaactccgtcagagcggtctgcacagtgcccatgacaagcatcatgccgagcccgaagcagatagaggcgacacaagggaccgcccactgcacacccttttcagcggaccagccataccaaatcaacgaggctggatacagtgtcaaagccagccagatattctctctcatccggtcctcgggaaagtacttgatcatgccgttatcatcgtagcgattgggtttggttgcctcacgagccatgatgtggttgatccagcgaccaccaaaagttgacgagatggcgtactcgattgtcggtgctaaatacacaagacccacctccaaaatgctgaaattgtagagggccttgccgaagacggagacatccatgatgtacatggtaaagaaggcgatgacgccagaccaaattacgacgatgacgggctggaagcggagcagggccaatgccttgaacgggccaaagatggacatgaatattttgacgaaaatgctggtgctcttctgcttttcggtctacggctttggctcacgctttgcgatcgtctccggcaaacacaggaaaatgaacttcagcatcacaccgccaaagatggcgagaaaccagagggtacttcgccagccctgatttaaagcaccactgatcacgggcgccagaccgtgcccgcagagagggcccagttggaagactcccatagctttggctcgtgctttcggatcccagatatcggcgacggttcccacgcccacggattggacggaagctgcggctccaccgctgagcactcggaaaacgatcaacattgtgacgttgacactgacggcactgatgcaggagaaagtcaagaagagaaaaaaggagaggagataggccgttcgccgtccatgcttctcggacagtgcggacctatacttcgtggttaacaagggtagctctcatttctcaatttgcaggtctacttaccaccagataggagtgaaatccatggcgagcaagtagagtgccaccgacaagtttgcaacggtcggagtcgtatcgaggtcatacgctacctcggccccgctgtgattttatcaatgggtaatcatccacaaggaaacaagcaatagcacccacggaagaagatagaggagcccgtggaggaagtaatggcagcgaggctgacagtcacagtcatcgcccatttggttccattcccatattcacgcgggttggtgatctcaggaataacggagaatccgcccagcaggcctcgccgccccgagcgagggacaacaacaatctctggtcctatagtgctcgctattggttccactttccctggagacttgatgggctgagtgggcggagactctgtggcagacatttcaaaatcgcggttgaggttgagattgttgatggccacgccagggtccttctcgtcacccggcattcttccggtcaaaagtggaaattggtgaatagtagagctgggcggatgccacgatgcttatacccaggcacattgtgtatacgggttcttcggggagataggtcatttcccaggacagtaaagccgagcaagaaaatgccggggtggacacaggccagacgattttagaccattgaagaatgtgaccatgatgtactccatgaacgggagaaagccaaagaaaagaaacgaggacgtttgatgtccgggcgccgctacactagtgagcttggtgcgcctatcgccggggctgtgcagatcccttgggtactttaagtattccccggggccctccacgcggaaaatcaatacatttgaagtcgcgagaccgctaaacacgaattgtgtatatgatgacacatatttccagaaagggagaccgacaagacataggagggaaaatagttctgtggggatcaagatcgtactgatagataacaagcatcagtagctttctccatggagaattcggcccggagatactaaccagaaaatgccgagccgaccctgctgggtacaaaaggtgcctaacacgctcaatattgattgactctgagataacccgacacgatgtccgcttcacgccccacgatccttatcatcggtatttcacgtggccttggccacgccatggcggtcgaattcctagaaaagggatggaatgttgtcgggacagtccgcggagagtcgcgaaaattactccacgagctagaagacaagtacaacggtctgattgacatcgagaccttggacatttgccaacccgatcaaatccaggcgctagacaagtgtttgtcgggaaagatattcgatatcctctttgtcaacgctggaacaacgaatcgtgaccaaacccaaaaaattggcgatgtatcaaccgaggagtttgtacatgtcatggttacgaatgcgctcagccccatgcgtgtcgttgaacgtctggcacatcacgtggctccgaaaggtcttattggtgtgatgtcctctggacagggaagcatcagcaacaatgaaaccggtcagcgagaggtatatcgtggcactaaagccgcgctgaacatgtacatgcgaagctttgcagctcgtcaggccccatcacgtccaatggtggtgatggctccagggtgggtcaaaaccgagctggggggtgtggacgctcggcttaccatcgaagaaagcattcccagcttggtcaatgtacttattgcaaagcaagaacgacccggactcgaatacctcgactacctcggccgaactgttccttggtgaaacataatcacgtggctatatgagccttcatttttgttttggccagagtctcccttttttctttcttgttccttctttagatgtagattctaaatcatatcaaccgtgtttctcgatcagtactcactagaacaccaatccattattgtacatctagataaatcaatataacactaatttaaaggctatacacagaaaagtcctctgacggtttatgctttttgtcggtcttatatatatccaagaagacatctacgaagagattcaaaaagacattcacaaagacgactacaagatacgttcaacatggcacggtatattccttatcattatcttgatcttgcatcaacccactattgacctttggtccttggaacgctctgagctcttgttttggaatctgagaattccgctggagtccgtataggctgccagagtagttctgtcgcctttttttcgagacagctcatcaaaacgcttagtgacgacacatctcttgtcatcacgcttgaggcagtctgcctccagacgagtttctacggcccactcgactgcgaagcgacgttctcgcatcgtgggtacattgtactcttggtgtgtgctcatttagatgttcaacgtactctcagtgtgcactcagtgcgctctcgctgagattttcaaacttaatctcagtgtatgctcgttgagatgctcaatgtgccctcgacacatgatcattgtctgctcatcgagatgcccgcgaggcacgtggagacatggtaggtgtcgagcggagtgtccgaattggcgcaagcagaccttttaccaaggactcagcatgatcgtgggtttcttgatctgattgtaaacactggagatggcggacgaagttgactctgtcatctggcggaaggtgagtgtggaaggcttgcagaactcatacagtgttttcgttctgactgattggttggtagctgtctactttctccatcttgccagtggatgttgttcttagagagatgctgttcttagatccagagtcaactggaacccaaagatggtgaccggagctcaaatgggtggggctgcctatctgggtatagctcccgcattagttgcagatcatgtgatatataaaacattccgaatgcggccttatcacgtaacctttttttctattttggtcgtctctttggtcgtcttgtattggtagtcttcttaagtcttcttagaagtatgaaggcggtaaaaagcataagtgcttagcattgtctaaacctatatacagcaacatacatagtacggccagacgagtagagagtatagtgtaaaaaagaaagagaagttgtaagacatcaaatgtcctctgtaaagcaagctaaaaacaatcactccatatccaatgcagaccattgtaccaattcacataaacaagcgccaggcaccaagaataagggccgcggtaccggtacagacacccctagagagagaaagaaagtcagcataatctcgcgcggcaagatagttcggggatcatacatgagccactgcaacgtcgagaacttgacagcctcaactcgttcccttaatcctgcaacctcctgttcaattctcgtttcggtctccttgatacgcatttcctggctatttgcctcctcacggatccgacccttctcaaggttcagatccagccgaactgaagcttgtgttcgtccaatctcgtcccggagccgggagttgagtttggcgaggtctgccgcgatcttctcgtgcgatgaacgggtcaattgtgcctcggtcgagtctgcgttgagtagctccgagcgcagtttggcaaagtctactttttgtgtataagttgatctctccgagtctagcaaagcgtttctcgttagatctccggcaagcactataaacgatgcgcgacagagccgcgttcacataccttctcggaggaccattgtcctggtcagattctggattgactcttggatgatatcgttcaatacccgcatcattgctacggactgttcctcgctgaagccctccgcctgtaggcgcttcacgaatttcagggtatcgaagtgatgatcgcggtgctggactgctgtcgcatgaaaggcgcggcgagcaggatggtagctagccacatagaccccattgtgtcggattggattgccgcggtgaggtttgggcgttgccggcgtggttatagaggttccgcgggaaacaagatatccggagatgacatcccgggacgatgtggtgatgagccgggaagactcgaaaggtgggattagagaattaaattgtcgcttggaaggactccagccttggggaagtggtcgtctttgacttgtcgcaagcgcgggctggtgggtgatggtaatggatggacgcgaaggggagctgttccaactcaggcggggaaggatagtgcgcgggacatccgcgacatgtttttgagacgccatgtcaaggacagcgggccaacaagtatttgttcaacgagtgtactttaaaccgatcaagaatgacgcagaagagggaagcttggaagattccggggcttgaaatgtcgggatgactaaagacctcggaacgcttccagtttcccggcccattacccgcattgcctattttattgtggagtgaggtgtattctcatttcatgcaattgaggactatttttatcgaacttgactaaagcttctttcagaaaatatccaaatcagacttcacatgtaaacgctatcacaaatctatgccttttcggctactgtcaacctcttatctataagtcaaacagcttcttcatctgcttgatggtgtcgtcaggaccagtaacggcatgcccaatggtgcgagggtcctcgtagatctcataatcgtttcctccgacgcaagtcttgtcgccgaagaagtggatggtcttgtagtcgacacccgagatgcccttttcagcttcgacgtgctgtaggcagtaggtcttatcccaaccggtagggaagacatcgaaagagatctgaccgccgatagagtagctatattagtagattgattagtaccatattaaaagtaaaccttgccggacaaagacttacgtgagaccgtagtcggggaactccttcctcaaggcctccactagggtctttctgatgttgtgaatcttgtcgaaactatagcataggtcagtcaggcagtccatttatgtggacatatagaagatcagcccgtacgcttcgaactcagcacgctcgtcggtgctagcagcacgtccaacagggctaacattaaccattccattacggaactcaacgaaagtaccgcgcttgcgaggcaacttggtgttggcaataaatttaagaatgaaatccaccagtgtttggtacttgtcctccccaagccactggatgaagttgttggtagcaagcggcttgccgaggcggaatgcggtcaggccgttttcggagaagcagaaatcgaacatggtggtgacatccatggtggctgatccaagttgttcttgctgcttcacaaggttcgagccgccaacctacatcatgttaggaacggggtgggggtattgattgggaggagacgaacgtatccaatggcgcatttgtggcgcaaccgagagagcaactcgagcatctctggcgaggcatgctgtaatagaattcgttagtataattgaacaacaaggagtctcagtgcaacgtacccgtcttgcgggggtgagagtctcatcaacatcgaacagaacaatcgtgttcttcatgggacggtcctccaacgaggggtaaacactggtagcttcagtcattttgaaggatttattcaattgagtctgcaaagaccaaaattgcgggttactcgggggtaaatatagagagaggggtccattttggccgcaagcggtgagtgaaggcggaagcttagttgggtccagaagcggaaggccacctggtctgtttcactgttttggagaaaccttggtcgattagagcaagtgactcagtcagatcattgatctaaatcatttccgtcctggagtacacgatgttgtacaggattgacagtgcgacctaaacccgtggactcttttaagcgcctgactgttatcgataagaaacggaggggtcaattatcagatctgaaggagtttggaaccttggaaacatccatgaatgtgcatttgagaatctctaactactggttacatacctgaggtatatatttcctactgtacagtacaagtgatatatagccaaatagacatacagagtcggaatgtccaacccaacccaatccccacagagacctgtaagagcccagctcccaaatccagatcccgaacacgcagaatgaagtatacatacttagcgtcccatagtggactggaagaccttagctgctagctcacccaggagccgcgtccgatcagtgttcggcaggtccaaaaaagcctcgtagacacttttgcccttagcatcgcggaccgcgccgagacgattacccgccacagcgccagccaacgcaccaggaaagttgccaacaatgaagcccatagcaccaccgctaacaccgccaaccagtgcccagaatcgcccggttgagccagttcggctgccgtctccctcctcggcgagaccctcctcgcgtagcatctcctcgaatacggagccaaactgactgttgtctcgttcatcacggtttccaccgaatccaaaatcggaccaggagaaaccaccggtgggtgggacatccgcttcctcctccgctgcccgggtagcgtcatattcccggcggcgtgtggggtctgatagggtgaagtaggcgtcgttgatttcttggaactttcgagtgcgttcaggtcgctctggcgagtcgacggggactcgatcggggtgggatttcagtgattccctgggattggttagaggggcatttcaaagctagttgtgatgcacttaccgcttatatgcacttcggatctgttgttgggtggcattctggacgatgcctaggattttgtctggtatgtgttagttgggtcttaattaggcacttggagatcttacaataatcgggagctggtcaagagttagtatatatttcggtaagagggagtgaattaacatacttgacatggtcacacctggttttgattttgattttcaacagggagaatatattgtgctaaactattgctagactcgaagatgaatttaagagactatcacatgcagtgacgtggttgtcgcctaaccccgtcaggtacgtaccgtggttcaactgtttgttctatttgttttaaactacatcgatctatagactgtactccgtagtgctctattcatgttcaaacataatattgagatgattatatggcgaaatcttactgaaagtggatgtcttgactatctggggtactttatctcctgcagaatgaggtttaagactaagttcagccgaccataccccagccgcctttgttccgccaggggtggttgatcagactaatatgagtatcccctttgattcgcttgaaattagcatctagcattgtccacacccctcttacaatcccatttctgccagctgtcaaaaggacttacctgcatagaaaatccacaaagcggctgcacacattggcctagacctcagattgcgcatatccgcagcagctagtggctgacttgcatctgtctcttttcagtcttccaattgccgcacaaaagatttcagaggagattatcaggggtgtatcgttacccagcagcatctcaaacccgccttcctgtgtaccaacccaccgcaatccctctcctaacacaacaacccgttccccaaaccagacaccttatcgtctgcccgcagtacccacagtcgcacccgtaaccgtccccagctccaacatcagcatcagcatcccacatcaacacaatgggctggttcgacggtaaaaccagcgcagcttcgtcaacagggtacgcgcgacgccggtcatcaccgacacccagcacgcgcagcagacgcagcaaatccgcctactcctcgacgcagcatgcgcgctcggcgccgtccttcttcgggctaggcggcagccgaacaggcggccgatcgagtccatctgtgctctcgtcgttctcgtcttcgtcttcgcgccgggcccggccccgcgagggattcgtgcagcgcatgctccgcgacatcaagcgtttgttccgcgatatctatcgctgggcccgtcgcaaccctatgaaggtctttctgatggttattgtgccgcttttgacgagtggggttctgccgaaactgcttgctatgattggcattcgcttgccgcatgctgtaatgagtgcccttggtggcgcgccgaagcctcgtgagggtatgggtggtggtgagaggggtgtgtcggagcatattagcagtctcgtgagcattgccaagatgtttgcgtaggcgactgctctgctctgctctgctctgctctgctctgctctgctctctaggcctgggtaggctgttctgtttgcgcccgaggttcttttttttttctccacgatttgcaatgctctgctgaaattcagcacatgacgatcacgattatacacctactgtcctttgcgacttttctcgctcttatgctcctactcttttttttccccgttgggctttgccactttgcgatgttgtcatgaactgggaggcccgtctgaattcggtagaattgatttcttaggaaaagttgttgttttgtatgggcaatgaaaccttgaaagttcgaaaccagtctagagatacatgaagtctcctatttatactaaaccagtcaggtgttggtgcccaagcaggtggatatggcagcatcagacaggtacaccgcactgttgccagtgcactggccctacgacagacccgcctataaacctgccaaacataggtagatcttcctggcagaccgatatttggggtgtactagtatctgaagtatcaaatggatctacagggacgcagcacatattgtaccatggtaaacaatagccagtggctgcattattcggccctgaagtttgagatgggaaaaaaaattatgtgtacattttgtctacttcggtactgccaacatccgagcagagattctataaagcagcctcggggaattttgtgatctgcccggcaagaaagtggcgacaacgcccggtgcagcaatacagctgccccggtctatcatcgctgggagcgcttgccacgtttccgagagcgggagtttgaggtggcagtggtctcggcttcctcaaccaagggctcctcagcctcagaatccacttcctcctcaggagcagtccccaacacccgaccgacagtcttgttgaagcaccagattggaagcgtgcacaccatggtctcacggagagtagggcgttcaatctgatcaatgtcaagcaggaactcctggcgctcgccagcctcgttttgctcttccaagaacacattgccaatagaatcgacaatcagcgtctttccattctcagcaacaacgcgcttccgctcgccagtgctggcagtctgctcggcagtggaggcatcaggggcacgagcgctcacacggactcctcccttcttatccttcttgttctccttgtccatcatgcgcttctgacgacggttgacagccacggcaccgacgtcaccggattcgggggcaggagggggaggcgctgcggcgaccgactcgatcccagggataccacgaacgcctaattcatcaccccaggcggctcggcgggcctggcgaatgtagcgatcgacaaactcgcgctgccgcttccagctgaggatcaatgcggcgtagtgagcaccaccaccgaagactaggaacagacccaccagcacagagcccagaccaggacggaagcgcgagtagtagtatccggtacccttccacagggggaagccattcttgaggaagtggtcataacgctgacggttggggccgcgcaggacgttggcgacgaggttcagacgagcggagcgggcatcggcgttcttgactgcagcgtcaatctcgcgctgggtaggacccttgttgacattgacgccctggttggacttggccttgttcttgtccttggcgtagttggcaatgaaagcgcgcttgaccttgtccgggtggatggttctagacttcttgcggtaggccttggtgatttggtcttgattggcattgggacggatctcgaggaggtctgcagtgcgggtactgagttagatacgtatgccttaaaggagtcgaaaatggaaaagaaagaacagaaagaacagaacgcaatgctagagcgacgacacataccgtaaaaagtcacattggcaccttcgttggtggccacatcattttgtagaccaaagatctcatagtctgttccaggtcagtagggagggttggtccggggtaaacaatacccaccttctttggaccaagcagcgacgaggccgaagaagacgaagagcgagagaaaggcaaatggcttcatgattgacagcggtcaatgccgcagaagcagaagtctagaaataaacgaataagctgagtgttagtggaggacatgtaggaaaaaaagcggtcgggcgtttatccaccgaaccccaacgtggccccaatggcgatgtttctgcttggacgagtccagttgggctcatgaatgattgcatctgagctcactttgtacggaatacggagatggtatatatagagggatagagggatctagattctacgtagtctcattcttctccagaagacatcctaggaataacctcagggacccaatcctattattagtagggagtccctaactagctattccatctgactcgatgactcctggcctaaaactaaaacacgaaaggggaaaaggccaagaagggaataagtgattgccttgtctccgtgttgtttccggcttctctctttcctctctccactatacccatcacttttgttacctgtcccatttcccaggctttcttattctgctcttcttcccttcttcccttctcaaccccttcttcattcaaaatggtctctatcccaattgatgcgatcacctcgcgttttggcgatcgtctcaacaactttcgcagcacctctttaaccacccgtttcgccaacctgcgcccgatctccgagttcctcgacgtcaagcgcctatccaagcctgccaacttcggtgaagcgcagagtcgcgtcaattacaatctgtcctacttctccagcaattatgccgtcgtgtttgtgatgctcagcatctacagcttgctgaccaacctggtgctgctgttcgacatgatcttcatcagctgtggtatctacggaatcaacatgctgcagggtcgggatctggatctcggcttctctcgcttcaccacttcgcagctctacaccggactactcatcatcggtgtccctatcggcatctgggcctcccccttcacaacggccctgtggttgattggcgcgaccggcgtgaccgttttcggccacgccgcatttttggataagcccatcgagaatgctttttccgaggaggcggtctaggtggtcggccgcgagctccttttgatatgccctcatggggaagaccaccgggggcacgaacggggagaaatactaggggacgcgcggcgtgggaggagactcggctggaggaggtggatagtgaggaggatgcatacgggcgggagttggtgcggagcggtcgctacagggagtatggaggacgagggctgcggaggcgacctgtggattacgaggatctgacggatgaatctgaagttgatgggggagaattcgatctatacgaccatgaagatagcacagtggcctatgcgattcagttggccatgcgggacaaggaagatcaattggtggacacggcgctcgagcgaattcgtcgcgcccaagttctggggaagaaaaatgtgcggctgtcgaaacccgagctggatgccctggagcgcaagcgccagcaagcggacggtttaagcggaagccgacgcccatccaccagttctgtcaaagtgacgtcgcgcccatcgtcccgacggagtgcagttgttgcgccagaccagatgtccggcgcgtatcccacctttgctgatgcacacagtatctgggctcgtgggacgggcgcgaatagccgaccgtccagctcatcttccgctccccgtcccgggactccaacgactcaatctcttcgtccacagcagtccagttcacctcttcgaccgacctacccgccatacacccccgagcgatttgcccctagtggccgaccacagtcgatgcaacaaccgcctgtgttccaacggccactgccagacgatcctcaatgggccccgccttactacaatacaatgcagatgagctcatacggcgaacctgcggcatacccaccgcaggctgccaccgccggacagcgaatgagttacccttccggctctgcatacccatcttatcaatctcaatccccgggcaaacgctcactgcaaggcacaccacaggctcggaccgacccagctccagcaccagctccagctccagcaccagctccagctccatccaaattggggtcagaggagtccagtgaagaatcggagagcagctcagaggatgaagtgcagatcgtcaaggtggccaaggtggcggagcgcaaggccccgcctgctgcagttgcgcagaggcggccagttactggaaccactcgtaagcggaccagtcgatgaagtggctcagcgttgtcctgatatcctctaaatttcactttctgtctgggtttttttttctttagtgtttgttttttctcgattccatcattgcggtctttccgtaccgcgacggcgttttaaatagaccggtaggctacaatattatttcctggctcatttgatgtccacgtacgtatcttgtagggtttaacatgactagaccgatgcagcatttctgaaatgtctcaacatgctattctcggagtagccccaaaggctctagtacctggtattgccaagtattcagccacccgggctacccgtagatcgtgtgccaaccttggatcattcatatcactcccaaaggtcttcaaaggtacgatgtaaactcttatataactagggcaagtacaatataaccattgcagtaaatcttggggcagatctttcgaaatgaggctgtgggggcgcacaaatttcataccttggcagcccacgatatgacgtcgccttcacaatctccaggttttaggggagcctaaagaaaaataaataacagcttgaaccatttctgtctttcgcaactgcttctcctttcaggatatctaggaatccactataccacaagaaatagacattccccttgcgcatcatcgttgacccggttccaattcgatatccctttgtcatctaagcgccactgtcgccccttaagacatcatttgaaacctggaatgctgtattcctatgctacattgtacataaatacagggatatagggtgagtcgcacgatcggggaacatacttggaatccataccttctttccatcctacagggaaccactgacaccgattggagaagctgcgactgacaggatactataggctctcgttcgcctcgtcactctttcaatcctcaaacccccactctctttgaattggtcatttagcgggcatacaaagatcttacacaccttcattgttgcatcaaactcagtctcgaagaacaaatcaccactcgaaagtcgacagtcgaaagtcgcaaacatgtggattatatcattttggatgtttccattggtgtcagcctgcatgtgggttggtaaggcatccctgcatggaaatggaacaggatatcttgttctgggctgcagctaacacggtcctagcaatgttgatcgccatgctggtcacctgggtcagagacggcagaccgcactatgccagtatggaagcgggacagactattgcgtatgtttcctctccgctattagcccatgcatgcgctaataggttttcctacaggtacatttcagatgttggagcacaaggcttgaaaccgctgttcatcgcaggcagcgtggttaccgtcgtgtttctcgatttggcattcctctccgagcggtggcttcgacactccaaccagttggcctcgaacaagggcaggttggacaaggcatgcgctattgcatcaatctttttcgcgatcgccggtgctgctggtctgatcctgctctctatctttgataccctccgccacccgaaacagcacgacggtttcatcgccctgttcatgtgagtcttgtgtactcgactatgtatagtcaattgtgaactaatcaatgaatttctctccagtgctggatacgtgattagtgccatcttggtttgcatcgagtaccttcgcattggaatcttctaccgtcgcgagcaccgtattctgctagtcagtttctttatcaagcttgtcttcgtcatcttcgagctctccctcgccatcgccttcggtgtctgcatcggcagcaaaaagtcgtccaagcaaaaccccggcgcggttatcgagtggaccattgctttcgtcttcactggctacgttatctccttcgttgtcgatctattgccttcagtgcgcacacgcaaccacgtgcctcagggtgagaagtacctgatgaaccagggcggattcggcggaacccgcgaagaggctgtctctatcgaagaacccctgactcatgactcgatgggcccaagcaccggcttttaccgcggtcagcgggtctaactaattctctttgcttcttatattcctgtatttacttatacgacctgcacgatgtcatctgatactctgctcttgttaatgtttgtttgatacctgtcatggatactctttatatatggtgttttcaggttgggcgccgttgtccttagaatacatatttagtctttagcaattcaataactcaattttagatgcttcctatacttctagatacgaaacgaaaatatccaatcctccaccatttatcattcgcttccaaatgcccatacatataacaagaaatgctagacccatcccaatgccaggtcattatcgtatctacatatcccatatgaaatacagaaatccatatccatccatatacccaaactccaaaccccaaaaaacccaaaagagagaaaaaaaaactcaaaccaaaaacttcgccctaattctctcctgcatctcaaacccaaccccaacactctccaagtaccctttaacacccccatacctagtctcaaggtactcagtcgtatcacgcacaaagccaggcggacaacgcgtatagtcctccccaagccccagcgccctaatctcctccatcctttcctcaaactccgacacaagctccatctccgagcgactgtagtcttcaacaatcgcctccaccggcaccacattcccaacaagcagcaacacaagcaacacaaccaggcccgtccggtcctttccctgcgtgcagtgcacgatcgttgggtaggtctcctcgcaagccaggagctggaacacggcgcggatctcgctcatgctggaatcaagcgtgtcttgggctagaccggttagtccgcgcggttgcattactgtcccgcatactagacggactgcttcgctgcggtagcctgttgttatcaggccgattgttttgcttttttgggtattagttgtttgtttgtatataggatataggtaatgcaatgtatgtaaagctgcaggtgaagaatggagaagggggagggggaaattcttacagatatgttggccagtctagtttcgatattaaggcgcgttcgaagcctttgccggttaggcttattagagctcgttttgagccggggatttcgagcaggtgctcggctgggtttgaggggagtgagcctgtcggtgatggtgatttctgtgatggatttgctttggcattttcgcttcgccgtttccgcgtgcccattcggtgttcggttctgtgttggggattagtttctgtttctcgcgtgcttgattctgctgttttctgtttcgacatactgggaacggagatcgatgacggtgtgaatgtgtagttcttctgctagacggcgtttatctcgttctgaggcatcgtcgagctgcaaattgcaagttagttttttttttttttttccttccttctcgtgtttattctgacaacgcatcgatcgtatgagcggggttagaattaccctcgcactgcggaaaaacacgccttctttcaagatcctacgtgaaatcgttagcagctgtgtctagagagacttgaatatatgtatctcgggactccagacgcgtctgaactcactctttgttacagaattgattaaccgaccggccgacatcgcggaaattgatgatgttgtcgaaaggccgatccggcgagtctagatccacgctgttatggcgcgacatggtgaattagggattagggaatataaaggaaatatagacaggaatcttgttagaaatgagaaggaggagcgtgtttaaacgtgtggagaagtacaaatggcggtggacgcggacgtcgacgttgggcagacatcgcgtttttggccgatagtcgcctggacaatgaacgtttttggcttttaggagttatattcattcaattgtcattggttatgaggatttattggtgactttggtgactttgtatgtgtgggtggtttgaaggggtgactgtacgagtgttatattccaaggtccttttgtatatttttaaaacctcaatgttgacagtctagcggtctgttacttgatcttctaatcctcaaagcaaacaaaaaacaaggaagtagcaatatacagtgctgaaacaggtaccggagctaaacaaagaacttagatctaggccccgggaaaatccagaacaaggaaggatctcgattcaatgtgtcatacaacaccacagtcaacacctttatcaactacacatattgctcccggttgttcttccattgtggctgcaggtatgaccaatcgtgattgaagttgaatcctgtacgataagccccatatgcaaccagatccacctgactcagtctcgcccctcggtccgtcagcgcccacagactcatcgccaacgtgttctccccacggttattgatcacgccaggtggaaaagggaacctagtctggggaccgatgtgtggcaggtaatgaccgaactggtacccattcatgaagatctggactactgcggggaaatcagcagatgcatcgagctgcagaccaatcggaacgtccaggtcggagtccaggtcgagctggaacgtcgtcgtgtagaaccggcctgctgcaccagatatgccgtccagcggactgtgcgaggttgcggtcttgggcgctttgtatcctgggagatgccaaccgagacgctctccatagagacccccttcgttcatgggtccccggacgggatcgatgttggcttcgcctcctgcattgccttggatgcgccaggaagtgaattcgccaccaagaagcgtcgcgcctagtataccacgcgggttttgtgctccgtttggcgacacgttcgcctcgtcgtggcctgtgtaatccatgataacggtcagaacattgtctgtcttgcgcaaggtagcgctgttgaatagtagctcggctgatgtcgcggctagggtcggatcaccaatggctccgccaacatagactccgtttagccaggcggcccaaccagcggctgcgccgttctggacagtgagatttgcgcctgtcgcggtcacgccatcgaaccgtccgcgatatattttcgttccggcatggtagccgtagtcgccagagtaaagcacgggaagtgtgagtggtgccacagagttgactgatctcgttttgttgcagatggtccagcgagaatcatcgtagtctgccttaatctccggaagggtatcttgcgctttccatgatttcagagtcggcagcgatactttggcttgggctcccggggctgatccgattaagctgccgtatggtgtcttcttggttgagatctctttgccattccacttgattttggtcacctttgagttgcccgtgtagaccctaacagcatatattagcgagtaaattatttgagagcttcgcgcttactcaatagatgttgtgtttgcgttgtcaccaacaagactgacagtatccccactgacagtcgctgtgcgaacgagatatggcccaagggcaatgatctgctcactgggaaccacaatcggattggaagtagtcggtactgcaaagaagttccacgctgtctccttatcaagaaggtagaccagtacgccgtgcgagaatttcagcactgtcgtgccatccccttgagtgtatgtgtatttcgtgccatgattcgatgcaccagagttgactttcgaattcccgtaagtttggaaagtcagatgggtcggtgcgtctttgaatacaaactctcctttttgtccgatattcagatagaagacaataacatctatgtcgagggtggcgtaggtcaagacctcggcggatgaatagagcaagctcgagccctggccaatccggtagtcagtgacgataattttgctctgacggccggccaactcaatattagggattgtcagggcccctgtcgtgtagaattcaagttagcgcaattattcctctcaaacactggagtacgtaccagccgatgtattgacattaagtgaagtagtggtcacagcacgagatgagctggtagagtgcgcgagaacatagaaaccggcttgggtttctgggtttcgcaaggcccacgtatatatacccgcatcactggtgtaccctgttccattcccttccatttgcatttgtaaaagaccagatgacacgcgcgtaaacagaccgatcaacttggtctgcttgagtttgtcccgaatctcacgcgtctctcgcatgggcgcagagtagtcatatgaagtatagacaaccggagcagcactgtggccccaagaagttgcccccatcaccatatatatattctgcaatgtgactctggagccgatattattcttatagtagacatcggcgaattcaggcgaaagctcggtagaacattgatcgtagaacgtccctccccagggggagaaccaaccgccctcaaactccggcagatactcgggctgagaactcgagtaattctggaaccattggtaataagtgcggacgagattgaacccagtatctggattggtacaggacagaccaccaggataggagtccaaaccatagacattgacggcaccacccacatcctggtagtccgtcgaccagctcatagagcgcattcccttctcattatgcgtgctcgggacaacgataccagcctcattgaaggcggctttaacttgttccatgtacttgacaacagtgttattggcactgtgtgttgtctcctgcaactcattctcgtgctgattgagaatgaccggaccaccgcttgtgatttggtttgcggcgatgatctttccgatcttctggatccacggataccatcggtcatagtaggtgcttgcgctcgtgcgcgtgctgcccatttgcccattggatgcccacagtgcgaaaccaccagcagaggtctcagcattgcagtaaggtcccgcgcgcgcaatcacatacagacctgcctgcttggcataatcaaagacgcgctggacgtcgtgggcaccgttctcgaagtcgaaagtatcttcggaagcggagtggaaattccagaagaagtagactagtctcaatgagtaccagtgcagcctgggtgttgtcaagccactcactagaaatcgcattgaatccatttgcgcgtagcttctgaaatacgtcgagccaaagctccggcacggggagtcgctggtagtggaattcaccagagaacacatataccctctctcctttaactgagaggctgtattgatcccatgtcacatcagtagtcttgccattatctgtcgcagagacgaaatggctggatatgagtccaaggagtatagggagaatcgtgagaagacgcattattgggggctgcacaggtactctccatcttggaatatgacttgttataatgtgtgtatgcttcggtcctcgctacagaaataccccgtactctgctgggattggtggatgttttgttttggagatcgaatgtcggattaggcaattttccatgaagatgcgggggaatgatcggcttttgactagggacaggtggttctgaatgaattttggacattgaatacagatatacaaatatgcgtctgtacttgatttcctctgccacttcttggctttccctttccgtcttagtgctcagtccttgccgctttttgctcactgaggacaactgagcacgtcgctgagtattacctaagctcacggacttgctcaataaaatgcaccacgctagcatccaaatgcagttattcaccagaactcaagcccactcttgaccgttgttccctcaacgaaaagatgctatgccactattcaactcgccaagtctcgtattccacaataccgtctctacatagttgcgggaaatatccaaccctcagggactgaacgcacttttgggcggttatgttacgatcaaggcttggtagttcttttcttatgtcgttggctcgttggctccttccttctctatagggatcgttccttcctaagctgtaggagagtatactagattttgcctggcaaggagaagggtacaaaactcacaatggccctgattcctttcctttcccccccatgttcgatgttctagttagaatgtactctttttcataaagcatcggcgcgtaatattatatattacacatgcggtttagaccgacactttaggatagaggatatttgagcttatgagatgatattatcggctgtagttggaccccagaagagatatcgattgagttgactcctatggcccctgacactactgtttactcatagctgagacagatctcagctgaccgagagcttccccattgaatgcctcacttgtcaccgtccagtgccgagaaatcagtctcttggcaatattcacggaacgaggtcattttcagaccaagctatagaaaggtcagtcatgtcccagagtggcaacgagatcgaataggataacataccttctctggtcgtacaacagcaggatcgataccttcgtacccgaactcatgtgcaaataatacattgtgagcaaattcgtgaccaagacctccgggaagcaactcgcagaatttatcgtaggaaagctcgtcatagccaccatacttgaaaccttgggtttcgcaaaagatccggaggtaatctgaccacgatacatattcaccaacagcaaataaattgacattgggctcggactctgcaactgccctgacgcaagggccgaaatccttgcggacatgcccgaacggaatgcccttgtcacctgggccaattcctgtcattcgccaggtgccatcaactacctatgcaacgagtcaataccttcaaaatacgcccgggaattacgaaaaaaaaacaaaagtcctggcggggcgatttcatgattcataccttcttcggggttgtaggaagtccccactcccaagggagctggaaatatatgggcgcctgaacctgtgagaattttccagccagggccgggatgctctgtgcatagatggcagcgtctgctttagaatccatatgataaagctcggtgaacttgctgttactggaattcttcgcatgggccattgagctgaagatgtatcgggataggccaggaacagtggccgcagcatcggcaatattcttgccctgttggagttcgacatcgtggcaatattccacaagtgattggccgggcttcttcttctggtgactttctggatctttgaagattgtccagaagtcggtgacaccaaaaataatgtcggctcccacaaaggcttcgctcaaggatgccacatcatcaaggtcacctttgatcatttcaacacctttcatctcccatttctttgcagtatcagatgccggattgcgcgtcacaccgcgaatcttccagcccggattcacaaggtaagcgtcggcgacggagcttcccttcagctttggtgttagtaacctcaggcaatatccaaagaaattgtacagggagcgattctaacttacttgcacacccgtaataccgaggatcacaataagtcgcgacattgtggaagatgttcggtaataataagataatgaccactcaaccgaaaaagtgattgagtgtcttgggctccaataatcgaatcttcgatatcctctcaaccctggaacctggcaagacctcagaatttatatcttggacttccaaaaaaaggcatcatgagacatgaccaagctgtacttcctgattgataatctgcatttccgttgccggtcgcttggtaatataggaatgacgcaagcaattatcccaggaatctcgtgaatgtcgatactgcagggcagaatcatctggtttgcgatcagagaagccagagagacccacttaattgaatttgaatttgactttcgccgttgaacttaaagtcgcgctaggctgtggggtaacagggaccgacatccctatccggttaggctggactgctcactgctttcccaatcgggaacatagtcatatattgcttgtatccctatcaacgagtgccacagcgttctctttgtctagtcagatgtaagagtctggcccattccacggatttgggcaatatcggacttcggggcctgaattaataatatcgaattcgatgagtgctgtatgtctgcatcctacttaaagcaaagctattcgctacatcaccgtaacatctttcctcacgcttccacatttcactgacattgatttcattttacatcttccctccaaagctctgacttgcgacatggccctcaacaaagaactgtcctcaacctataaccagtttcttgaaactgcgccgaaggaagtgtcttccatcatcacggacgcggtcagagactttaaaaacagttacgatcctgctagagcgatccagccgggggacgcctttccacaatttcacctgagcgatgcgaccggtaacgaagtgtcgttgaatgatctccttgttaaaggacccatcctgatatctttttatcggggtgaatggtgtcccttctgcaacctcgagctgcgtgcgcttcagagccatatggacgagtttcaccagaaaggcgtgacattggtagctgtgtctccggagctacctgatcaatctctgaccacatctgagaaactgttgttgaagtttccagtgctttcggatgttggtaatcagctggcgaagaaacttggcctgttgttccctcagcccgagtctatgcggactgttttcgacaaatttggcgtggattggaaccagcggtacggcaatgacaacctggagcttccggttccggcaactttcctggttgataagaagggaattgtgcgcaattcctttgtgaatcctcagtatcgtcaccgattggagcccgagattgctattgagtggattgaccggctttgatgttggcttttgctgcgcgctatcttcacactcgctttgaggtctgctgcggctggaatatacgcgcgggggagggggctggttgattgggtttcatatcgttagtttggcttcgaaggatctcgacaccaaatcccaagtaactcggcgagtgttgagtcatgacgcttttctccatcccgaagaaacctgtgccgtggctcgtggtcgatcttttctagtctcgcttcctctactctagaataaacacattcgttgacttgcacttttagtatgctgctcctgtaactctgcttgaaccataaatctccgtgctaaatgtgcttttgacgtattatttaatccggtgctctatattttgaattcttggcatctcgtatcagtgaatacgaaactagtgatgagcaggtcaccaattctgctgagatcgcgcatggattacaaagcagcccacagtactttgctgattaatgccctggtcgtcgtggaacatcaggtgagccacacgacgttgagaagacattaggacaacctaattgatcctaacactgaagaaaacaatggatagtgaagactggaagtctaggggtgctgagccaccgacacgggaagcgcagatcctccctgcccgtccctcacacagatcacgaatgttggcaaggaagcttacgggtgtccaaccgtcggcaactcaagacctcaggttcataaacctatctcacccagatgacttacaccgacaaaaagaggtaagaacggagatccgtcgccatgtcatgaaggatataggccaacgacggagacgcccacaacccaatgcaacctcttcgcaagccacccgaacattttcttcggagtcaaatggttacaaaatctctcagcttcgtggcgcaatcataaacagcgtttcacccagccaaaatttagctatgctcgctcacttccctgtggaggctgatatgcgcgctctcgaactgatgcactctggtaagagttccaagctttccgttggcctctagctcctctcatctgttaatgcttgctctatattagtcgtcacgggcccttatcagccattcaggggtgtttggattgaggtagccctatgtgaccccggggcattccatgtgactctcggcaatgctgctgattttctcaataagattaatggcaatcaaagtgtgaaaagtccggaggctttgagtcactttgaaatttcaacaaggaaactaagacagcgtcttaataacttcacggagagtattagtgaaggggctattgccaatatattggcccatgtctgtctcactgtatgtgctatattcctgaatatgagctcttgaataacctcttttccatagatgaggcactgtgattgggatagctggagtattcacatggatggtttgagtctcatagcgaaactacgtggcgggtttgccgacctcggacatcgcatgtcacttctcatactgctgtgagtactccgtacctctttcattttctagacaaaacttctgactgttccttgcaaaggtacgatctagctggtgccatggtctttgattcctatccgcgattcggtctcccagcagagtttgttggcatatccaatatatcttcgagagggcttgcccctaggctacaagctttacttgtccaacccatatcgcccgcatttttcccagcgggccaagcattaacaatggtttcctcaattgcggatgtgataaataccactagtcactccgcatcattctggaaaagggatatcgatgcaatccgcctgatcggtccctgtattcactttttgctctcaatgccgagatttcccagcaatttcgaggccatggctgatcccgaagaccttatcgcgagagaattggttcgacttacatgtcttatgcttatgtcgaaattgaagggacaattcgcattccccccgagtgagctagtttcactacctgctaggcttgccgaattcgtgcctccgaatgtaaagaggctcggaaaaaagtactttgagctgaaaatttgggcccttgtcaccattgctttattgcgatattgtgacggaagagaggtatacatacaggagatgaaaagagaaatgtctgcaatggaaaaagcgacaccttacgaaattactgggattgccagagatatcgtctggatcgacatcttgatgtcaccattttcagaggagctcgcagcggatatgaaactacacgtcactcctcaaggaacctgttgaggtcattgacgctaaatctaataagaaatatcaacccacgggtttcagcagaatgaaaatgtaaatttgcgtgcatagctctatctgaaaccaagacaagtcgtggatgtcacaactattgcgggatggagtagctgtgtcagtttctcaggatatcagagtaattgaaaatagggagtacaccccaagacgatcattgtgagatctcatttgtattggttatttggatctgtatttacataggctggcgggatgaaggaaatgggctgatttccgcactcttttcagatcagcatctgttttccatttcggcaatgttgttacgtgagaaaccaggcatctaccggcacttgattaatgaaaccttgaacgacggtgatatttcatgcacagaacttggaaaactaatcaccaggccccaacctcttccattcataaccttctcgcataccggtttacttctcaaatatggctaaaccttgtgaccgctgaccagcgcccaacttgtccagctcaaaatgctggatctgccggcccttgaaagagtcaacaacggttaaagcagcgactgtggtgccatttcctggggaaagtgcgtatacataatggccgatggctctgacatcggtgagaccggggtcgccatttctcaggtctaggatcgttaagatcttcgagttatcattgcggacttcaactagtctgttagatgctgcgtcggttaaaaatacactctctcgcaacggagagtaggtagcccaacacgtggctttctggccttcgatggtgatcttgtgcttgagagagacttcatcggtgacgtcatcgaggataagaacagtggctccgaaagatgcgtccgtgatgaataggtcagatgtgccggggatttcaacgccaccaaatagcactgccgtactgggcggagagcttcgaatatcatgactctcgaagaccgacgaacacgaatctttgaatggcaggacagatacaaagcctgctttgccagcagatgggtcccccttcaccgtggtgattagacgtgtatcgtttgcggcaaagaagacctgtgcgactgtatttgttggcccaactggaggtgtggtttggtggagttcgaaatcaactacttgatccatctgctgtaggccctcttcagcgcaggaaacgccggatttggccccagtgtatcccacgcaaggagcaccactcccaggtgaattggaatagaaaaatgcatcctggtataacaagtagaccactagcagtgaagaggggaaagaaagatgaagttgagctgagatgttttcttgagaattaccactgctcccaaggcctttaagtatcattttcttgaaatatcaataactaaacccgcgtgaaaagatgttatgaatctaccgattcaggaaaccatgtttaagtcaacaatgctacgctagcggttccacacgccgtcgttttgtatttcaaatcattcgagatagtctggaaaagtaagaatgtttgaatcgtcactctatgcccgcccgtgtgtgggagtctcgtacggagtaatcgaaacattttagagatcagtagttcgatatagacttcggcttagccccgaatagacgaaagtgattcagtcaacaatccgcttacatttatgggtctcacggaaaagccgatcttccgctgataatcttgaagtccaagtttggagcttcattgtaatttctaatccaaggtcatctatctcctctgcaccgatctgacggacttgacgtgataccaagctccacagacccaacatgaaaaaagcatttactttccttcctggatagagctgttgttgaaatccggtgccaatgtgaatgcaagaacagtcagacatagcacgtctctgcatttggcagtcgaccaagacgcagcgaacgaagtgactggattactttttgggtacagggtagattggaacagttcaaatgaaaaggacggacttgatacaccgttgaaaacaatggtaagtcgccttggtgacatgtcgaccggtttgtatatttcagagacatcgttaattagatcgattatataccaagcatccaaaaatcattagcaaagtaaaacaatccgaccctaatatcctccagaagcaccgatttcaaattccacaacaccaataatcatcccaagatccaaaaataataaaatcgtacatcaagtcaaacgtttcaaatagaaatacacatcaacattcaatatgaatatcacagattctcggagaatctcgattctcttctcccgttcagtgtgtcgccaatactaggtggcacaggaagactctgcccgatagtactatcctgcagactctggagatcaccgttcccgacacccttagacgcagattgaactcccgaatcacgacgggagtcaccctcgttcgacccatcggggctaccggagacggccttgcgtaatgtcctgctcagacggttcctcttcctgccattgcgattttgcttggtaaactttggcaaaggatcagcactatggatcttggccacgtcaatgtcgttgctgtagtagctcgaagatctgttgtgcgtcgggacaggttcaatcacaccaggaggatgtgaggcaagcgctacgctgcggggctcgtcgcggccggtcagagtggcgccgccttgaaaggcaggttcgctgtccgtgttaatgtccggacctggctgatgagggtagatggggactgggccactggagcggcgaacgagacggtcgcggaaccagttcttgagcttcgtgtcggcgcgcgggcttgtaactggtggcgtgaagtagtgcaccatcgttgggcctgaggcggctgcatctcgctgctcaatctgggcgggctcggtctggcttcgtaacggccgccgcgggattgctgcgggcacgtcactctcgtcggtctttgaaggttcagtctctgagaccgaggagtcagctgcaagaacagttgtaggaccggctatttcagtctcaacagaagcttcgtcagggatgacgctcgaaacattgtcgtctgtcgcaacattgtcctgtgtctcaacattgcgttctgttgcaacattgccttctgtctcagtattgccttctgtctcagtattgccttctgtctcagtattgccttctgtctcagtattgccttctgtcccaacattgccccctgtctcagtagaagcgtgctcgggagtgatgtctgtcgcaacattgtcgtccactgctgtagccggagccggctctactacagcttcctgggtaacaggcgagacagcttcggcctcttcggtttcggatttctcaacccgagctcgtttgcccttcttcctccataagaagaatttgggaatcttactctcgaatttttcgtgcttgcttgcacctgatttattggtcagaacatatcaagaaaaaatgacagggtaactgacctttttcttgcttctccaactctttcacctcagcttcgcgttgacgctccaaatcagcacgtcgctgctcctcctcagcgtccaaacgggcttcgatatcatgggctctccgtaattcggcattctcggtaatctcatcgaaagcgggctgaaggcgagcccgagctacagcatcgacgtcggccatgtccatatacctttggccgccgatgttcactcgattgtcttgggtggtagcggcttcaaaatcctctgcctcctgtcgtgcgcgctcctgggcaacttcatcccaacccctctggacggaaggcggagcgcgaccggtgtccgcataaacctgcgcctccatgtcctggagggtttgctccacgttgcggcgagcagcctgcataagcaactcacgatccttgttcttctgcacatctacttggcccagcttggtccgcaggctagtcatctggttccggatttgccgcgactgctctacatcgagctgagaggcatccacatcgctagaagttctcttgcggcgggtggtcaagcgcgaccgttgcggttgcggtgcggtgccataatattgttggtattctgcatgctcatcctgcataagagcaagtttctcggaagctcgcttttgcgctgcttcttgtagtgcgatcgcccgccggatagcatctccatctgcggtggatacggtcttgcggtagcccaactgactttgtcctctttgggctgctaggatggcagcggatctgccgggttgtttcttggtactggtgactctgtacatgtcccttgccattgagatggcagcagcgcgttgcgagttcttgtagttttgttcctcaatgtcgctttgtattggtggcgatgaagtatatagcttcgggttagtgctagcggcatgctgtatcctgcttgcttctatggcatggtctaagtggttaagggggggctccacttccacacgagcattttgcgacgcgctagcagctgaacggctgtatggtatttctgaggcaacccctggatcactgggtgccgagtcggctctcttacgcgagagcgtgtaagcgcccgacgcagcctggagcgccttgtccttcgggttaccaccgacggctgtgtagtggaaacgatcggtcgctgagctgtcacgcctatgggaagtggacgtaggggcctggctcacggaagccctttgttcacgaacagcgagcattgcagctcccagtccctctgcactgtgctgagaggttggttggggttgctggggcggaacatagtccttcacgcacaatgcggctttctcggcggcaggctgtcttgctgggggccgccatacttcgacaggtttgcgattcgcatgtgcgagagcggaagcagcggaggcgtggctgaggtttggagtaccaccgaccgcgcgtgggtctaccgcaaataacattgtcagcttgtgtgtatttcacttatcgagggaccatactcactgaagttctgggtattaatcggggtcggggcgcgaagagatgccctacgttcagggtgtgtcacatataaggcagcagtcgcggctaatctcacgtgaggttagcgatccgacggatatcctgggatgcacgatcatcttaccatcatctgccagccgggactggcgagtcacttgcacagttgccataattcaggaactgcaaattccaatataaccaaagtcatgaaaaagaaaaagaggacagcagagaacaaaactataaggcgaggtggatatggaatggaagtccggaaagcttctttgatccccgtgacgtcgattgggaagccattgcatcatcgctttggagattttgggatttttttatggagacgatcgatctgtcccggagctacgctactccaagctccataggggctagtgaaagatctaagtggagtgaagattccgcattcgaacaagcggaggcccgtttttcggtggtgacgcgaggactcggagttctgatttacttctgaatgaaccctgatctacgtcgatctacgtcgatccttcatatttcattcggatactacatgtacctatgtacctatatgtaggtacgaagtacggtgatgtacatcgaagttagtcgtgagcaccttaataataaggcagggatcgccaaggatttcattatgaccgatgaacgagaatcaaaaggtcataaagtccccataaataatatccatgtagtattccgacgtattgtacgagtccaacatatcatgacccaaagtgtcatgcttccaatgttgcttccaatcaccgtcatctcgctcttatttggacacaagaacttcccatttgtctgcacattacaccacaccagccgtgtatcatttagctagtcgcgagtcgacatatatagacgcatccacaacagaaatcgaaaagcccgcaactgtgcgaatttatacaggcttgcgcacacttgcagaattctaactactaatttcatacccaactcgatggatcatctctcttatcgcaaaggtgttgtataaaattgcaggaatagtttcttcgggtactggaaatagattgatggacatttgcagaaatggttcactcagatactcgacataacttgatagttaacagttgatcagagaagaacaggtccctcgcctcgaccggtgggtttcaatatcatgccgaggccaattgcccagtcatcccttcctgtctcttgaatgagctcctccgccaagtctagtctccgcgtgtaaggggtcggctttccaaccaccttaagcatacgcccatacattcggaaaccctttgataatcccgtacataattccaatagccccgccgatacaagcatcagacaaaggagacacaggctacccattatggatgaatttcccgagatgacagcggacaaatataccatgagtgtcgagaaggtgatgagtagctcgtcaagcaaagttttgtctcggagccattgcccggaagtaacagccttcaagtcatcgactgtgccccgaagacgaatccatcgatcttgtgtgagtaaaatgagaagatcaccgttcaccccgggctctgtctcgcctttccagtcaatgtgactccgtatcttgatagaccaggtgttgcagattctagcagtcatccacatggcaagtgtcaccagggcccaccaatcttccaacaatgcaaggatgataatcacagcgactgtcaagatctgaccaattgcatagaggaagagtagagtcttaccagggctttcgatcaagcatctcaacttctcctttatggtagtcggcggcaagtccacgactaggttgagtagattacccgtttttccgacactttgcaaaaagtgcaccgtggcttcattctcaatccgaaagacgtatcctgacgtcaaagctcctgttgggggtaattctccgccactaagactaggggctgaggaatgtttgtgcatgccgggtgccagaaaaggatatccgcgagggatgaagtaccagtgatagcagtccatttggcgatactctgaagatccgccagagctactagaccagcggcgtcaagctggaatttgccagaaaggtcggatagggcttgttggaagttcattttgttaggatctgtggccgaagaaggaaaggtgggctgagaatgagagataaattcaaaaggtcgtagacaatcctatttatatgaagcgaactgagagtgactccgatgtcttcatatacacaaataggccgaattcccatactgaaagcagtttcctgtctacgccagcctcaccgtggttcgtccaataggaaggtgttctcaccctccaactttcgtgattgctatttttgctgcgatgtttcttttgtttcccaaaggccattctctttatgctgtttcgtgtatgttttgtcgcttatggactcacctaggacgcataagcggggctaatggtcaggaaaaatgctatactgtaccgtacctttagtattcattatatctttgatgccaattactagcccatgcagcggccctctctggtcttggggaatccaatctagctcacgagcttgactgagtacaaatgcgggatctgatgcaaactcagtagatattcttcgtttggatcacagacatgagcggggaaaagtttacctagaaatgcccatgctttgacaatgcagtcccgttcctcaatgcgtgctaagagagaatgggcgtattcctcgacagtgatcgtgttcttctggagtatatcccgcacttgagtggcggtcaagagatacggcttttccaccatggtcgatgatagttgggttccggacggtgagggccaatggcggttaaaatactggactcactcgagatagagaagtcgcacgactagataatgtgcatagcaaagaagacctcaagaagaaccgcatggtggggtaggtatctaaggaaaacatggattcttgaagtggatgtttcagcacgactttgtttagtctggagatattttgagaggcaccattgattggcgatagcatgctccagattcgaatatctaagttgcgatataagccacaatcgagttagagtcatcaaagacggaggacaacctcggaaagatcgtgtgtgacaaaggaagtgggggaaaacgagcgatgtcgtaccggtagctaatcaaaatacgacgtgaagccgagtcttggaaatgacggtggtggaagaaaggaaggggggaaatgggggcaaagaagaaagaaaagcgaaaatagaagtccagccacggaagaattctgtccctggctatgcatggtctttcttcgatgcaatattgctgccaatatgtaacatggaatgaccagatccatcgaagactttgatttcgatgttatttgtttggctggccaactcagcattgtcaccaatctgacccacgaaatcatccttcacttagacctctccgacatggatggtgcgtcgctggagttccatgcggagaatacgcttcagaacatcatcttcgccgtctataacctccctcaagagttgtaggctgccggaactcatagcctggatctccttcctacgcagctgtccctgttcattggctgtggaggggaaacaactccaccaagttattgaccaaatcggaaatgttctcgactaaattctcatagtttcctcgcttgtaaagagcccaagcaactcggtctctcttccgtggcttcaaacgcccatggataatatctggcatggtgaggtggagaccgttcagcgaatcgctcgctttcgcaagttcgatatctgtgtcgaggagcaacaatcactcatgtcatgtaaaatcatagatacccgccccttgaactgcccaaggattgcgacgttacgcattaccggagataaagcatgtcgaggatgtcatgacgggcaaagaaagaccggttccattttccaaagacatctataccgggaaacggttagtcgggtgcacaacacatcacccagtaaaacttacacatgggaatactcaacaggcagatgcccatttggatgctaccgatgacaatcatggtatgcttgatgcctccgtgggcaaaccatttgtaggcaaaaaaggtcaggacaaagctaaacatgtttttgaaaaccaacatgcaggtaaatgcctcaatggccatctcgcctagtaatgtcagcaatcatttccacgcaagacctaggagtccacatacgatgggcatcgacgatatagagtgaagcagcaacggctcccataaccatgccgacgatcaagaatgcaaagaagacgtctggcagcagccagccatagtgcatcacattattagcagtccacccgaacccatacagtccgataccacagaaaatgagctggggaatcaccaagaggatccggaactcaggctcgtatttaccgtggttgagccggatcatcagcttgttgatggaatcagaaagcagaccagacagaatgaggcctacaacagagccgataaaggcacccgtgtaaagatatccggttttgtcttcctcgaaccacattggaggtccgagaaacacaattgctagaaccacaccgacgaagaccgcccatccgatgacgacgccttggatcagacaagcctatactttaatcagcgtatgtgaaactaagcgaagtgggttacttacccagaagatgcccggatggaagaataacgggaatggacgaaggagcagcttgaaaaagctctcatctgtttttcgtccattgaacagcctgagcgattgggcgaaggaatctttctctgggactgttatcgcggcttccgtcttcgaacttccatttataccgttggaccttggtctaaactccttggtatcatcactggaagccccactgagtgaaacatgggattccatggactcgccgtgcccgccgcttcgcttgaagtcggtgttcaagtaatctgagcgtcggaaagcagtttcaggcacgaaaaagaacatcagtggtagtgaagaaccgaggaaaatcgccacaaagtagaaagaccactgccatcccatggacttggtgatcttgcctaccacaacgggtgtcagaaaggctgcaccaaagagtgcgacattggatacagccattcgctttcctcgttcctttattataccgattagtctcctcatgtgtcaaatctacaggaaaagtaggcccaactcacatgaacgaagtaaaggtctccaacacaggcatttaccaacgcctcaaacggcgccaatgcaacaccctggaatatccttgcccatatgagactattcttgttctttccgctaaccccagcccagatgcagctgacaatcatcaagacatgcccgatcaggaacagatgacgtttaccccagacccgagccgttggcacaatgagaattcccgccacgccgacaccgcataggtgatatccagtcaacagggcggctgctgtaaacgtgatttcctcgtaatctgcgatggtgactgtatttgcggctaggatagagcttagggttgtgcagaggatcgttacgaaggagaggatggcaagaatcgtatcgcgtcgccataatggccagttctaacagaaccattcgggtcaggacttttgtcgtggaaacaaattctagggtgcggtgctctctgggacataccaatgggtcgtttgggtcatcgctcggttgcggtacgaggataatcggctgattgcccgaccagtcgcatttaaggcctgaggcacccggggtctggtcgctcgcatcaccgttttgttcgtagatatcagaggtacctgaagttttgaagttgtgatgagccacgcggattcgcttgcgcctaggcgggtaaaggcatggaatcttacctgggacatgcgcgagcttcgtatcttccagtactccaagacccatgattgtaggaagccaacgaggcggggcttgtagataatgcagcggtttaatagaaattcgaacaaggtcagcagcgctacggagtaattctcgaccctccaaagaaggaagctacgtgaaaaagcttcccggggccaatggggataaatagcagatataaataaatacgagttcaacttgaggactatattataggactaaatataaggactaaccttggaaaagataagcagctcggtcgatatgtacataaggcccgagtgtgggcgtaattttgaatgtgatttgaggtaaatttcaagtctattgtacaatatacgacatgcaaagttccatctaagaccgcgtttgggccgacctttatgagtgaatatatgtacaggaccgtacctacggagtacatacgagttgcccaggtaagcctggatcggcgcttccaagcttagaccgaggcatcacattcaggctcgagcgtccaatattcggccgaggtgcaggtggatcttttacaagaatcaaacagcttggaatcagtgtttttgctgtagagaagttcgtgttgagatcagggaccgacccaccgagggggaaaaaaagccactagtgctgactgggggccttaaatttcccattcgaaccttgtgattggtatattactgaggtgtacaacccgaatggtcgtcataaagtagaaaatagagtgtggcagtgaattctgtaggaaacaaggcgatgggagaggtctatactcggaatatcgttgggaaataaatgccacaaccctaaacaaaaacctccacagctccatctaagcctccaggtaatttaacgaaataccaatacatggcagtctcaaaccacatacatttgagatgtgcatatcgattgattctacagcaatttcgcatcgtccatgtcctaagagcatagccaagcttttaaatacggactttgcctttcacaatatgcgtcgatactgaagaagagaaggacttgaggtccactgggcattcttgtcaacacgtgaccgctgatatcatgtgttaagtcatgtgatgaccagcgtcaccaacggctccagagctagactccaagttgtgaggcgcattatttccacagcagcggttacgacgtggtcgcgttccatattgaagtgacatcctcctccttgaagagctataccccgcgtcattgtcaaatcccaaacaccggcccccacctaagactactgcagcgagcgcgcgaagcacaaagcatttacgcaaaaccacaggtccaatacacctatccagcacatttttaattatgtcgtcggtctccccttcaaaggaacacgatcttgacccagaggcgcaatcgggggaagaacaagaccacatggacaaagatcaccacgacgcgcagggacaccaaggcgagtttgaggtgaaggagcaagatcggtggcttccgattgccaatgtggctcgtatcatgaagcttgcgcttcctgacaacgcgaaaatcgcaaaagaagccaaggaatgcatgcaggaatgcgtgagcgagtacatctcatttatcacaagtgaagcctcggagaaatgccagcaggagaagcgcaaaacagtcaacggcgaagacatcctattcgccatgacctcgcttggcttcgagaattacgctgaagcactcaagatctacctatccaagtaccgtgaaacccagtctgcccgcggcgacaatcagagacccccaagcgctggctatggagctggaggacctgttggtggccccgccggaggtgggcctggactagctcgtccgacgggcttccccaatcctgaaggcacaaatcctatgtcgaacctcagccttgacccgtccgagcaagacgcctctgcctacggctatccgcccattgtcggccagcctcacaacggcgcaggcggcgagtcatactagtggatgatgtgaaggggtcggctgacggacgctgcgcctagtttcaatattggctacatgtcctggagattaccgacgatgttgatttcaacggaggtctgagatgtttcagctaggggtctcggacctcagcaatgtgatgagaatggcggagtgttgagtttgcatacccgtgaacaccagcctaagataacttgaagaaatactgtaattgatgcctaactcaaacttgaagatttgtacgaacttacttaaatacccccgtaatataaataatacctttgaagatattaataaaatagtcctcattgctaggaagatccactttcggtgtaaaatatcaggagttctgatactatttaacatcatctccataccggccgaaccgcacgtgaaagagtctggagtttttgcggggaaaaaaggtaccgttcatctgcgtatcggcgtatttttgacctatctattggtttattaccacgacctggccacatggagaataaaacctctcacatttcctcccccaatcactcactttcatcagcctcaataggtatctgcaaagatgaaattcaccatcacttttgccctggcagctctattgagcactgccgctgctcaaggcctgggcgatctgcccgactgctcggtatgtgtttacagtcagacatacaactatgccaaatgtgccacctgctaaagaagccattgcatagaaaacctgtgctacgggttcaattccccagagctgcggcattgatttcaagtgcatctgcgagtccaagtccttcctggacgatgtcgcctgctgcatcgccgataaatgctccaaggctgaccaagaaagtatgttctcttccttttcctccatgcccaattgagtacgcaagtgcgggattattccaaaatgactacgcataatggatggcggaacatgtacattgggctgatatgttacacttcaccacagcaaccatcaaggtcgccaagtcaatctgtgcccgcggtggtgtgaccgacctgcccgccgaggtggtctgctcgagcagtaaatccagttccagctctggcgccagtaccagtaccagctccagctccagcttgaccgagactggaatcaagtctagcactgagacctcgagtacgacggaaacttcggattcgactactgcgaccaatacgaacgcttctaccgcttcctcgaacagtgcctcgtccgtctctgctgcggcgactagcactggtgtcgctgctcttgcccacagggattcttcgctcgtggccgctgctggtgctgcggcggcgttcgccattctgatctagcatgaggcgtgctagtgatttcaggggctggtacgtttggcgacattgaaatatcgtgatgaggatggtatgaatggaaacacgaaaatggcttgggatgcacctgtgtcttattttatccatgatataattttaattgaccggggacacggtatgtctaaatgccatcgcttttcaatggcggggggatatttcaagttaataatacactcatagaaaggattaccgaggaacctgtggaagtgctcaattctcgcgggtatcctccagcagcttggtcaggcgttcctggcgctcctcgcggagagtagcgaaagtctgtagagtagcacattagcatgaaaaacagccaacagggtcaattctgcccgattaatatattcccacttacccagaaccagaacatcatttcgaagaaagcaaaggtgaagaccaccctgttcttcaggcgatccagacctccaacagccgctgcgcttgtgtaagacgaggccaggtggtcacctctgccttgatagataaagaacgcaattccagcatacacggcaaagcgacaagcagcaacggcgacccagacgctccagtaaattgtcaaggaattagtgatatattcgggcaaacgctgtagcacctgcagatcctcggcggggaggttgccatttcgcaggggccgaatataagggagagcttcatcgagagcttcgtggaaggggatgttggacagtatgacgacgtcgataagggcctcgacgaagatgaggatggcacagaaggtgaaaggggattgttgcgggctggacagggatggaaagtcctgtatcatgggtgttagcagccaaaatcaaatcgaataggaagttccaatgcccatagggtataaatggacatgtgaatcgggcttgttgatgtggacatacaatcttcaaggcctctcctatcataaacaccagatcacagtcggtgatcacctcggggctcttgatcagatagccggcgatcacaatcagaaacacggcatgtgcctggagaagaagcttggatgaaagtaaaaccatggtgggcgagtcacaatggcacaagtttgtggacaagaggaagttcccaaagtacagacagaaataaataaacgacttggagttggtccgagtgttggccgcaacacatgtggggaaaaagcagctccggtcgagatatcccccaccaacacaacaaccgcgatgattggatctgatttacgacttgatgcctgctgattattgaactgcgtggattactagtggaacatcgccctgttcctatcatactacatagtggtccaacccccatcctctacaatgaccgacccaaacccaaccttcaacacagagcgccatgtcaaatactacctccgatgcctgaagaccttcctcccgtccgcctacacttccaatgactctaatcgtatgctccttgcctacctgaccctctcgggattggatgtgctcggcgttctccaaagcaaaaccacaccggaggaaagacaagggtacatcaactggctctaccactgccaggtgccttcgggcggattccgtggcttcccaggcacggattttgggccaggaaagcgaaataaggataatgaagcctgggatccagcgaatgttcccgcgacattctttgcgctagtcaacttgctcatcctcggcgatgacctgtcgcgtgtcaagcgacgggagtgtcttgagtggcttcctaaagtccaacgcgccgatgggagttttggtgagcttgttggtcctgagggaagtgtagggggacctcgtgatttacgatactgctgttgtgctgccggtatacgatatgttctgcgcgggcggagtgagacggggcttgacggtgtaccggatatcgatgtcccaggttttgtttcttttatacaggcatgccaggtatgtggagaccttgatgttttttctgcgattgggacactgacacagtatggcgaaacagacgtacgacggcggcatggctgagtctcctttctgtgaatcccatagtttgtgtctccctttccaccacctggatcatctaacaaccgacaggtggacacacatattgcgcggtcgggtctctggacttcttgcgccggacctcaaatgatctagaatcagtgcccctactattggcaggctccaatcaattcgaggctttggttacatggctggcttcaaggcaaacagcccagctggaggaacccgatgaagacgaagattatgaacagcttgagatgacagagacgggatctatcgatgatagagtccgcaggttacccaatattgaacccctcggggccgacacaataccatgcgccgggttcaatggccggtgcaataaatatgcagacacatgctattcattctggaacggagcgacactgatggtacgtggccgcctagctagtattgagtgtctactaacgcgaatatcagatgctagaccggtatttcgtggtcgatggagatcgcaatcgtcgatacttgctcgaaaggacccaacatcttatcggtggatttggaaaggggcccggggatcctcctggtaaggcgatagtattctgatatcgagactatgttgctgaccaaacctatagaccttcttcactcatactttggcatggtgtccctggctttccagggtgaggtgggactcagcgccgtcgatcccacgatgggttccagtgaacgcacggtccgacatcttgaatcgctgccttggtggcaatcatgaagtatatacataacacgcctgtaaaatgacgatggttcattccaccaattggctcatgtcagcacacatcagccaataggtgtcgactaagttaattgggcgtcggtgtacatcgtacgttgtacatgtaccgtccacaagtaagggttgaatcttaggccgtaaggcagtgacaacacatattcttctacctacaacgcaagattatggcgatcgtgatcaatttggtgcttcactatggagggattctagccaattaagtcgcatacctctgaagcaggtaatttgcacagcgtcagcgattcctaaatagaaacggaggctacggagtaatgtatattgtatctggtataactattgcacatcaagataataatagcagactccaaggaaaaaaaaggagaaccaagtgccgagttctccacacggtccacgttcccgttgacgtcttggaatcttccaaggcctttgtatgcaatttcccttatcctttcatcatttgcggtgttactctatttctccggccatctttccgagcccccagctacccctttctaaaacttctcgacctccactccgctcataccgtttatccgcgcatctcgtgtcccgttgaatggccccggcacaactatttccagtcaaccccttgacgcgcagagactctcttgacgacatttggcaatcataacatatgccgccccgaacaagagcgggggttcaaagccagaaacaaaaggagaaggtgcgtcatcagggatgcgacatagggagctccaccgggtttcctttgttcgagccttgcgcagagtccgtggaaatatggctaactcggaattctcgacagcttgccaactcctacaatgagctccttgagtaagcgatcttgcttccggtctggatggtcagttgcgctaacgtggtgcttctctacagggagttctcctccaaggatcttcggactgtaggaaattatacattggggcggctaattgggaaaggttccttcggcaaggtttatctcgcctcgcataagctcaccaatggctccaaggtaggtcatatcatacaaagaaagttgtgggggcaaggctgatcaagttcgcaggtggtactcaaatcgtccagcaaggaggacaccaatctcgtgcgcgagatccatcaccatcgccaattcctccaccctcatatcgcgcgcctatacgaagtggtggtaactgagagcctcgtttggcttgtgctagagtattgtcctggtacgtcggcttgcgcatggcagacgcatagagaaacatactgacaaagctcggttctaggcgacgaactttacaactacctccttcgacacggccccctaccggtagagaaggtgaagcgcatatttacacagttggttggagcggtcgcctacgtccacagtaaatcctgtgtgcatcgcgacttgaaactggaaaacatattactggataaacaagaaaacgtcaagctttgcgattttgggttcacgcgtgaatatgaaggcaaggctagctatcttcagacattctgcgggacgatatgctatagcgcgcccgagatgctcaagggggagaaatacgcgggcgaaaaagtggatgtatggagcttggggatcattctatatgcgcttttggcaggcgagctgccgtttgacgacgatgacgaccaaatcaccaaaaagcggattctgtcggacgagccgaccttcaacggaaagttcacggacgatgctaaggctctggtcagtctcctattgtccaaacggcctttgattcgacccagtctggatgagatcctggcacatcctttccttgcggaacatgctcctcaacaacttgcaatcctgaaaatcccaagaccatcgccatttactacgccactggagaagactaccttgcagcggatgaaaagcgctggggtcaatattgacgaggttattgaaaatgtcttggctcagcggtgcgacccactggctggctggtgggccctactgattgaaaaggaacaaaggaaggaaagaaagagagagcgcaagcgtcgggagcgggatgctgaagcaaaaaacattcgtcgtctgagcgctaccagcagtcgcctagaaaagcgatcatcggctttaatggaggtggaggaagaaggcatggggttgcgcgatcgtgggagacgggatagaagaagcttaccatcccagttggcagtgccagatcttcctgcgcttccagaaccgctccctgtattcccaattgaggtgaccacgccaccattgccgctcgacaaagattctatacgatcccacaactcgacgcgacggcgcccagtgcctccgccaaaagacaggcggcgatcacggcccagcatactgcatgttagcgcatcacagccggagttgacacagcatcacggcatcttccggcgtcgcactagtcgtcgtcaccagtatccgatactcagccaactagcgtctctcaaacattggtttgtagagtcggcgaaaagagcgcggtctccccatgccaaatcgacgagctcgcggaagtttctttctgaaaagttgagcccggctaagagtcaagatactgggaaaacccctgcacctttagcgtccccagcaagcgaggtcgcaggggaggatgttgttacacccacccaggcaaaacgagcctccaatgccagcagcctcgctcctagcagtgcctcataccgccaaaaccgccactcttaccctcaccagccgcgcccattgaacaccagtcataatagtcatcgaaactctctctcgccctcacctatcaccccacgcgggtcctatcggcgttcatcggccgggctccgaggtcgcaaatccacatcctcctcggtatcatcgatccgcagcattcaccacgctcgtgctcactccaaggcctcttcgatttcctccaacagtgtggatactatctcgacacccactgccagagcctccaggtcgcctcactcatctatcaaagtgctgcccaccactccaggcgcctcatcccgctttccgagcaatattcggttggtaagagggccaggcggagcacctcgagagttcggtgaccacttaggtcagatgccgtcgtcgttcaacgaagcggtaccagggccactgctctactcaccctcttcaagtctggtgtttgcaaggcgaaagagatctcttttcaagggtcctatgatccataccaccaacttgatggtgtctggtgggatagccaactcctctatgccgggtcagccaatggataccagcgggcctgacctcgcaccagggcggcctgctgcacgcaagagccaaatcatcgaggaagaggaagatgtcgaaggaattgaggaagaaattgaagaagtcgatgagttcgaagaacctactacaccaggaggtttctttacccctgatgagcagccagccgagaccgaatctccctcaagcggcagaacaccatttgatcctattctaaaccttgataccagtccccttcggcctcctcgctcctcctctttgcgctcgccgtccgataccccagacaagatcggcatcgccgaataatactccacccgacagcttccttgcaatttcccatatgtgcattagattcgggtgttcctttgtccatcccacgatcccttattcctatgtttgttagacgatagagcttttatacccccacttacacagcgtgtttctttttcatttccctttacttgtctctttttcggcataattggatccaccgttggacctatgcctctccctctcttgcgctcttttccttcacatttcctagcttcgtgaagcgctttctcttccctacttctccttgctcctcggtgattcgactctcgcttgattttaatgtcttttgcatagaattcccctgtctcatagaactctgtcccatatcatattgctggattgatcagcaacaaaatacttgcatgatgaaattgcatagacctatccactttgataatccccgagagttcagcttaccacaaactgaccggtgggctggcccacgtgagctccattgtcatggctctagggtggatcgttcctttactggagatgcgaataactatctgataacttgagcgtgaactagtgatattctatgtcgagagccaatatgacatggtaggatagttgctaaagacaaagaatagtacaattcaatgttgatcaatcaaaggataaatacaatcgtatatttatacaataaagattactcttgctttcactcaggcctttggtgagttgtgacaagcctgtccatgggtccgactacaacggtgtttggtatcatttggaatccggcatcggagggatgtcttgaaatctcactctcatttccaaccacccggctggaagttgttgataattatctcaggacttctatcacctgaatatcgaagcagttcacacactcattcaagagtgttatcctagtatcgaccgcatgtctcatcaatggacagatcagcttccatgaggggtctaccacgatgtctgaactgtctcactctttagcgtccaggctccaataatatcatattcataagactatcatcttttatgggggtctctactttacgatatcattcctctccaaggagattatcctctatatgagggattttatatcataacggtgacgactctgacgtcggtttcctaatatcctaccatgttgcctttgtatctaacgtttatacagtggtccatcacacagttagcgacattatccaagaaccaagaataccacccggtccttggcctgtttatccaccttcaaaaggctacagcaacatcgacaccccatctgaatgagtctcctggaaaagagcatctaaagcgacgaggctgtcgatgagcgaaagatttatgcgttcgctatctcactgctaagggggagcttgccaattgcccacgctttatatatatgctagcttctcgggaacgaaacttccgaaattgttgctgtgaaaatgagaatggaagagaaagcgctcaatgcggagatcttggaggaacgcggacattcacccaggcctttggcaagctgggagttcggcttgctctgccacaaattgactagtcgcaactactgggaagactttccacttcttcaagatctcgaatgacttcaacgtacgttatactcaattcgtgatggctattatcctatctaatctatatcagtggtcgtcggtatatgttttgggatatgttttgacgtgcgttcgtgtagcatttccaggccgcttggacttctcgtccatatattctaccgtgccgctatcatatcccctgcatactcggaggagagcttatgccaatccaactagtaagagatatctggtggtagcgccgcttttaagaccgtcgacgaggatgataaaatggaggacttggttgattagcttttatatctggtatcaatttttttcttttcctttttcattttatggtacctttttccatttgagctttgaaaagattatcgatggtttacgcttacgtctatgactcttggatactcaaattagttatggtcatcgcctgttactctataaagagaataatcctaggcatggaaattcaaggaaaatactaacatccattattcattaaccattaccctagaggatataccgaaagcagagcaaatagcaaccattcaccgctctaaatgaacggcttggtgcttctcgtcatcgatatcatgagagtccataacagcctcctcgtctttgatattctgactctcaagaccaacgtcactcccgccaatcctatccacggtatcagtatacgacggaacaaagttcacagcaatagcgtaagtccaagcgacgaccataaactgcaaccagcattagccaccgatctaacagggtagatacggaaacgaaaacaagaaacccccatctaagagcagaacataccatagtcggaacaataaacgcgaatcccgtattatcatgcatatcagcaacatgacccagaataggcggcaccacagcacctccagaaacaccagcaacaataaacccagagccgcgcttgtaatggcgtccgaggccacggattcccagcgccatgatcgtcgggaagcaaacagactcaaagaagagcgtcatgaacagcatagcgagaccaacctgcttggtctgcgtgaccgacgcagcgaggaacgctaccgtgcacgttaaatacagcaggaagacccagcgcgcccgcacgaatttcataatgcccgagccgaaaaatctgccgactgcgaatgcgccctgtgccccagcgaggtacttcgctgctgtggcgctagatgtacccgtccaggtatctttgacgtagttgatgaaatagcctgcgatagcgactgaggaaagagttagcttgatggaatattaagagagaagtataagataaagggtggtaggaaacgcaccctgcgcgcctgtatacgtgaattgcgccagtgtcgcatggaaaagcttgtactgtttccagaaaggcttatcctgctcgtccacatgcgtctgcgtcacctggaaggccatgtcctcgtctgtgacttcgggaatattggagaggaagaatacgccggcgagcaagaaaacgaagaccccgatggcgaggtagacccactgcacgcgctgcagggctgctacatcgtcctctgtctcggtgaagaagacataagagcccagaacggggccgacgactgtgccgattgcattgaaggcctgggcaaagttgattctgatctcagaatagcggggcggaccgcagactaggcagattcaaatgggcagctattaatgtctatgcttaattatctgtggagcatatgaatgtcttaccggttaggtagggattagccgctgtctcaagagaccccagtcccgagccaatgactaatgtggcaccacagaagccgccgaaggattggtttaaacctgcgggccacatgcacagggctccaataccgtataggcacagaccgaagatgaagacggtcttgtagccgtagttgcggaggatccagtttgcgtagccgagggaggctaaggggtatgcgctgggttttgttagagtggtatctttttttataatacatatgttatcgagagattccatacccaaagtaggctgcttgaagaccagctgagcggccacggtcgatatgtagggttttctggaaatgtgagttgagggtgtccagcaaaccatacgcaaagccctaattgaagtcttagtgggaggactggctataaacgagataccgtagcatacccataagaagaataaggtcgtgactagggtcaagggccacagactctgtcgtagagtcagagtagcagcagaagtagtcgcacgattatcaacacgcaagcccgaacggcttttgaggaattccttgacgcccatagtcctcggtatataaaaaagacaaatacaatagagggatcgaatgaccaagcggccaaatggggtatttaaatagaaaacgaaacaaggtgacaccctgatttccccacaagtcaccctttaccccaagtccggggaaagccagacgatccctggggaaagaccagcaacgtccaattacaagtcagaacacggagtttcaccgaggatcgaaggtcactttgattttttccccgctatacacccctggagaggtggcgtcagcgttgcatggttgttttaatgctattcatatttaggctatgcaagttgttctctcccgtgtctggtggaatgccactccgagctatattgagttagtcttactttactatcctagatagtagtctagatgacatcctaaggactatcatacatcctcctattagttcatgagagctatagatgatgatcactttgatagccgtagacaaaagccgtgtctattacagaatcacatgatccatccatgtcgttccaatattggaaagggatctccaagctagacgagggcgtggaatcaagggacaaaccgggcaagatcgacacatcttcgaataagctagtttatctacgaagacacagtacatattgtcctactgtccacaaatacaacaatcacaggttgtaatctttcattcggctgatctatgggcgttcatgatagcagtcataagtaatccacgcactctcgtattcaatgcatggcaaatatctagccaatcaggcaaaatctatctctattacacaccggttagttagctcctgcgcgagcagatatctaggagggtagggtccaatttagacccatcctttatgcccgcttgggcttaccgacggtaccgctctgggcgaccgggttgacggctttcgtgttgtaaagacgacgctcggccaacttaaggacctcgtcaatcaagctggaatgtggattagtaagatattctttcaggattaaggagaaatgacacatacatcacaggtgcactgatcaccaacaccgcctgccattcattccagtccatgggcagaatcgagaacaggttctggaggaagggaatgtagaggatggcaaagtgaaggagcatggacagagtgatagcgtagataagcatggggttgttgcccaggaagaaagtcaggagggactcgctcgaggacagcgcgttcatggcgttgagcatctcaatcaccacgaggatggaaagagacacggtggaggcagatttgcccatatcgttgctgaacatttcgcagccaatctcggggaactgagaggcacacttgtggtagtgggactgaattgacctggttagcaacacgatcaatacctggaaactttagagacttaccaattgcccgaaagagatgccaggaccatcggggttgtagacaaaccaccagacgtagccaaagacggtggcagcaccaacgtagatgccgacaaccatgtagcggaacaacaaccagccgccaacaaggggctcgtcgcgacggcggggagggcgattcatcacatcgtggtccggagggttgaaggacagagcagtggcaggcagaccatcggtaacaaggttgacccacaacagttgaacgggaatcagagcctcgggcattccaagggcagcagtcaggaagatagagacgacctctccaatgttggaagaaatcaggtaacggatgaactgttgagtgttgctgtagatagaacgaccttcctcgacggcgacggtgatggtagcgaagttgtcatcagccaagaccatgtcagaggccatcttggccacatcggttccggtacccatggccacgccaatgtcagccttcttgagagcgggagcgtcattgacaccgtcaccagtcatagcgacgacgtggttcaaagactggaggagatcaacaagcctagacttgtgggtaggctcagtgcgcgagaaaagggaagcggtctgaacggcctgcacctgttcactttcactgagagcgtcgaattcacggcccgtgtagctcttgcccgtgagatcctcgtcggcgccgaacacaccaatggagcgacagatagactcggcggtattgcggttatcaccggtgatgacgataacacgaattccggcggcgtggcatttcttgatagaatcggcaacctcaggccgagggggatccaacattccgacaagaccaatgagagtcatgttctgttccagcttggtgtagtcctcggtggtggtggcgttcttcaggagggggtttccagagacaccgtcaacacttgcgatggccatgacacgaaggccacggttaccatactcaacaacttcctcggaaagaagcttcaagtgattctgagtcacaggaacgcgagatccattggcgccttgaataacgtacgagcaacggtccaggatgctttcaggggcacccttgaccagtaacttttgtgcctcgccttcgccaacgagaacagacatactcttgcggtcacgggagaactcataggtggccttgaggggaagacgggactcgtagtgagcgctggcggcatgcaatttttcggatgtagggaggcgacgaagtttttggttcaaggcgatgtcggtggatccaattttctcaaccagagtacgcagggcgccttcagtgggctcaccgatgctggagaagactccgctcttggcatcgtgggaaagagtagcgccgttgcaaagggcagcaacctcggccaattgtgccacggtcgatgaagaaacggccaggttctcgacaacattgccattctgggtgagcttgccctcgggagtgaaagtagtgccttcgacgtcaatctcctcgaatccagtgccagagctggtcaggtaaacaatcttctcgacgctcatctggttagtagtcaaggttccagtcttgtcagagcaaattacgctgcagctgccaagggtctcgacagagggaagagaccggacgactgcgttcttttgagccatcttgcgggtacccagagccagacaggtggtaatgaccactgccagaccctctgggatagccgccacaccaagagagacagcaatcttcagatagtagatagctcccttagtccagccaccgaacgcggggtcattgaagttctcatagttgataacccaaaccaggacacagatgatggtaataaccttggcgagcatgtcaccgaagtcgttcagcttctttttcaagggggtcggctcggagatctgagaagtgatgctctcgtggatatctccaatggcagtcgagctaccggtcaacacgaccagagccgtagcgtggccgttgacaacggtggtaccagagaaaagcatgttgatctggtcctgcttgacggcctgctcatccttgatagcccgggtctccttcgcaacactttcgctctcaccagtcagaatagcctggtcgacacggaagctgttgctctgaatggcgagcagtcggcagtcggcaggaacacggtcaccgacagcaatttgaatcacgtctccgggaaccagatcttcggccttgacccttcgcgtcattccatcgcggataaccttggcctcgttggcggaatattcctggagagctgaaattgccttttcggcgctactttcttgggtcactccgacaacagcattgaggatgaggatggtaaggatctgtgaacaacagcaaacctcggtcagcataatagaacacatgggtatacagatgcaacgcaggatatccaggcacttacaacagcggggtccacaaatgcggtccaatcgtcgctctcttcaaagagagctagcacaaaagacacggcggccgagccaaggaggataagaaccaattggtccttaaattgttccaaaatcagttcccacatgggagtcgggggttcttccgcaatagctaaataaacggcagatgtcagttttagccatgtcatcattctgcagcggggtgggtactaaccgttcggtccatactgttgtctggaatggaagaccgcgctctgcgacagaccagtctgctccgacaccttgaagtgctccagcgactctgctggagtacggagaaaggcgttctccatgatcgcgacaccctcaacggcaataggcaggatcaattgcaatagccgcagaggtgaggaataatagttggggtaaagaaggaagaaaaaaaatgggtgcctgtttttaagatagttacatgcccggtgtaacacagagtcgggaaagagaagcagcccaaagcgagggacagggttatattaaaaaaaagaagatccaaagcaagcttggaagaaatgaagatcgaccgaatggggaacctccagtgggggaagtcaacgtgttctcatccatttgattccaggcgctgagtaagcatggacctacctgcgtggggagggcgccccgggggtctacagggctgaaggcgggtcacttgcaattctccgcttcgttttctcttctttctcttctatctttctttgattctgccttggattgagtatgaacgtattgaaagtacctgatacttccgagattgactatctttagcataataagtctcactatatcatgaattggagcgaaagcctctggtagggctccaacgtcatgtcaattcccagcttgccctatgggtctctaggctgcatcgtttcttgcctattagatacatgtaggttttgtgggtaacctttgatcttggcaccttcctaacaagatgagtatgcaatcttctaaatcttctaattcgaccaactcgactcctcactactagtgtgatatagatggacttgtgccatgaccacagctcttgacctatactcggttatcccagggctccggagcatactggatccaacctactcggcccacttatggttggcagggctgagatcttcaaggctaaagcacagtccctgctagatgggtcaagtgtggcatcttcataagcacgctaacatacccttgcctgtagggctgaagctagaaacaaaagtccatattgcatcacttagctatagatcatctactcaatgcctttaaaatcgatttaaatccttaccttggctttgaagttggccaaatagtcatttcaagccacttttagtagccacaaatagaagggaaacgaaagtagaaagtctcttgaattttgctatgcattcgccgatcaattgtgatatgattagtctgataattctagttggttaacctttcaagtttgggaataatcaagctgtggaggtaagaatgcatacggagtactccgtacgtgaacaagaaaccaagcgcctgagtgtctggatgcccttttacatgtccattatgtctttgttcaaaccaggtcaaaataatagtaacaaatatagtaagagaataaaaatccctaccttagttccaactcgcttgaccgcaagttatcacatgctcattgaggatccttagatagtatgatagtagttcatgggggagaaatttaacaaatgtccgaataaaagcgattgctaacaatatatttcactagaatacttttagtctgaactacttgaattatttgaataagactagaatacttgtgatacaacacctaatcttagtgtgtggccgatcaactacatcataaccgaccctattgtctggaaggttctaagagatttgcatcattatcatccccagactcttgcaatgccactgtgatttcactaaaatggaaataaagtggtctctacctcagcacctccagggctagaatggtgtcagttaggtatcggtcggagtccctatgacaaggtagtatggctccatagatacacaaaggggtgtctaggtacgaatcagctagaatcaagccatatatcatactagtccagtctcccgatgtcctgaaaaggagagtcctagtctaatattagcagtacttggtaatgaatacggtcatttataccccaccccgctcaaatgaattccttgttagggggatcgaccgtaaaatgaatactgggccgcggcccaagtaccgtagtacttccacagagcggtgccacaatagggggaagcaggtaccgggtacaagaggacatcgtattattgttatgatccaaatccccccaactcacttcacatcatctctctcccccacttggtcgtctctacccatcttcttctcctgcatctcgcgtctcctactcctttattttaagtctcaagttctaaccacctcgattcaatttcacaatgggttctgaggtacgtggctgtccccttctatcggctgtctcgagttgtcaccgccatcgcaatcccacattcccatcctcatctgagctcacccccatctggaatttttgttgataagaaccgggctaacgagtatcgtaactatgcagcgtgagaagtatgcccatcgtcgcccctatttctgaaacctcgtggcatgactgaccccctcaccagcaagacgttcctcgcgcggctctgcgagcaggccgagcgctacgatggtaagttgacatgcgatggtttggctggatggatatgctgacatgttgcttcttgcttgacagaaatggtcaccttcatgaaggttagtcgcaccctctcgtgttgtttactgagtatccatgctaattgctgaacaggaagtcgccaacgtatgacaccatcattttcccatcacttttgggaccactttgggggtattcgaaattgacacatttctagattggtggcgagctcactgtcgatgagcgtaacctgctttccgttgcctacaagaacgtggtcggtacccgccgtgcctcctggcgcatcatttcctccatcgagcagaaggaggaaaacaagggctccgaggagcacgtcggcatcatccgcgattaccgccagaagattgaaaccgagctggagcaggtgtgccaggatgtgcttgatgttcttgatgaggctctcatccccaaggccgagactggagagtccaaggtcttctactacaagatgtacgtctccaacgaaatttgctttcggtctgttacattttgctgactttgtaaacaggaagggtgattaccaccgctacctcgccgagttcgcttccggccccaagcgcaagggtgccgccaccgctgcccacgaggcctacaaggtaaacaattctcatttcggcttattgtcataggccttctctctttgcaatgaacagttgttgatcgtgtcatagaacgccaccgatgttgcccagaccgaactcactcccactcaccctatccgcctgggtcttgccctgaacttctccgttttctactacgagatcctcaactcgcctgatcgtgcttgccacctcgccaagcaggcattcgacgatgccattgcagagctcgactcgctctccgaggaaagctaccgcgatagcactttgatcatgcagctgctgcgcgacaacctgaccctctggacctcatctgagggcaccgaggccgagagtgccgccaaggaagagaagtccgaggaggagaccgctgctcctgctgttgctgccaccgaggccgctgctcccgccgaggagaagcccgaggaggctaagcccgtcgagactgaagcctaaaggaacattaggggtcgcgacgagccgtatgccgtttggtagggtgggcgttcgcatttattcctggacgtggttatgcaagtcgcttctttgttttcactgcagcgctgggttggaccggcagatatcttgcacgtcttcgggaccgtgtgggtcggccggcggagtttgatattcggttgacgcgagcggaaaaggggctgagtggaaatttctctctcttttattgtctctattcccactccagcacgtttcaatgtgtttattttccattccacccgagcttctctacttgacatgcaccctgtgttaggttgcttgcgtagccaatgattccccttttaccagtattcatgactgaagtataagccgatagagtaaacctagttattcctttattcctttcactcgactcgctggttgattagtcctaaagccttgacgaacacagatatctacagatgagcatgtgcattaatgcttcgaagttaaccaaattcccactgtcttcccctatattgcttacccaaagctgccatcatcctcagacacatctgaggctcatctctaggaaaataccggcacgcccccacctccaaagcaaagacaccggcacgtccgacaattccaacaactaaaaagcgccacagaagacgccatcccatcaagcaccgaagacgcagaaccaacaccatcggggaccaacatccctcgaacgattcgtcggagccaagagccggacagcaacaccaccgggcccaatgcggctctaacaatccccaacccgctatttcccattctcgaagtgaactcaaccgaaacacacgtcttcccaccaacgaagagtagccaatcgaaaccggacgttttgagcgccacgggagggtccgggcacttgcttgaatatgacagctgggcaggcgggcatcacattgcatgcaatgcatactgcaatcgtggtgtggtgacaggagagtgggggaatgccacgagggcgaaacggcggtgttggcgaattgtggctggaggggttgaggatgcgattggttttgttggttgatccctgcgtgtgtgttatcttactctctttgtggtataggtggactggcgaagtttgtttcacttaaggattgcatactcgctaggttttgtgtctgcagcgagtcagatgggtgttatagagtatgtgtttttttggatgttctgagtatatggcacaatgtcgattgatatagatcgaatttgtcatgaagcctttattcaatgattttgacttgtgttggtcccagagcctcatatcagggctcttaacggtcctatttgtttgcttagttcttggcaacagctgggatgaatgcaagctcttcttgtcgatcttttctaccgacctgtttctaatgaaaccgattgaagatgagcagaaagtctgaagtctacgatgtcggtaaatgatttaaatttagattccaatatatagttagatgaagatgcaacttgaagagacctgacaggtatcattttggtgaatgaaattgagcatgtagtcgctgtacgaagatctcctgtatcatcttccataggtagacacagacacatgaccaagccaacaaatcctagttcattgcacttgcatacatatgtatgtagtatgcacagctacatcaccccagttatacggaccctatcatgcaagtagagattgggcagatgcattaggattagaatctcgtctagagaacctttctcgattgcccccggcatgcatccgactccatgccatcgggatattccaaagatccgcgggatgtacgaggtaaaagcaatgcacatagtcaattccacatcttcccgcaacgcgttatataaaataacgccgaggacaccaaaactacacaaaatcttcatcttaagcagtcttttataacaagaaaccccaaaagaacaatccaatccaatccactataataaccaaaagtcccaaacaatgtcactcccacaacccctgcccctcgaaccagacgccctctacatcctcctcctcgacctaggcggcagctgcctcttcgaatggagactatacctcgcgtcaacgcacacaaccggccaaaccttccacataaccaacgagacaggcccagtaaactggcaatacaaaagcgaagccgtgtacaacatagcaagcgacatgcgggtggtgctagcgctgcaaattggcgtcgtcgggcccgtgctgcacgccgcgctggggtcacgtctggcactcatcccgctgacgctgtactcggctcggttccgggagggcctttcttgccgcgtgtgggtgcaggaggggctttttgcgttggatgatgagggatatctggatcttaccaggagtgttgcggatatcgagcaggaggctagacagcttgggatgctgaataaaagtcgggggtctaggtcggtggttaggagtagggggtttgtgggttgaatttatgattgtaatgggtggttattagctgtgggggttgtcatgatgtatgtgaagtcatgtaataatcggaatggattgggtctttctttctatgggttacttgtgcccaagcatttgagataggaggggatgtacagagcgatgttgtggaaaagtagaagaaaaaatagaaggggtaacattggacccggcagagataacctgcatataggtgaggcagaaatagaagatgtagatcttccttttaaggtgcgtattttcaagggatcaggggggaaaagcgaaacaattcaaatggagactggtcgtccgtattcacattcacataaagtcatcatccccaagatcatcaccaccctcgtagttggtgtgatcgacctggctgtcgcggctggcgttcagcgagatcttggtctttgccgccttggacttcttattgcccttgtcagaagcacgctcctcgcgcatcttctcgttggaagcagtagtgagagcactagcaatcttcttgatctcagcactaggcaagtccttcacaagcttacgggtgaagtcctgcgcccagagagagtagtggggcttcttggagtgcaaggtgaggagcggcacgagggtatcactcagacgggcgaactggtccttggtgacgggcttgaacagcggcatggcggacagatcgacggccttggtaggatcggttgagtcgctgacaacgacggccttgggggcgcccttgttgcgcttgagatcaacagtgccgaaaagatcctcggcgtgggcaagatcggcttcctgctcggtcgcgcgcagacgagcgcggcggtctgcctcgtcttcactctcagattcgccgctgccctgttcccgtaggcgctgtagccggagttcctctatccgctgggctttggtcttcttgttggcggcggcgacggccttggccttggcttcggcttcggcggccttcttggccttctcgcgctctacctcggaatcttcggcggcatcccatgagtcaagaacctatattcggggttgttagtttgttgttccttggcgcgaaggtgaggggcctgctggacaggttcgaggttgcgttgccttacatcttcttcctcttcgtcatcgaaacggcggcgaggcgcggcaacaataggaggaggcgcggagctctcctcttcttcttcatctgcgtgagatcaaaaagattagcaacagcaacatgaaccaaaacacgagctaagtaactgtggcaatcgctatagaaggataatacaaggataataacataccccacttggaaggcggcattttgagcaatctaaaaactcgttgatacgaaagaaatgaaggaacgtaatgcgctacacgcaaggccaaaaggaacaagccaacaacaggacccagcaatggaggggcgagggcaaattttatgtgggacacacttatcgtccccaggtgggatgttcacgtgatctcgggcattggatgcccgatgagcatgatctttgttcgtatcccatacatataggctgttcatttacttatttctaacttatcaggtggtggaaatttgttttcattgaaaaagatcctattaaattcataatcatcatgggcgatggctccgtagatcgtccaaccatcgtttttgatgggccctcatcaggcccgatctatgctgccgaaaggcggcatttacaggttgacagcagtgcggaacttctcgccagcgtagatagcgttggcaccaagctcctcctcaatacggaggatctggttgagcttggcaagacgctcggagcgggcaggggcaccggtcttgatctgaccggcgcggaggccaacggcgatgtcagcaatggtgacatcctcggtctcaccggagcggtgggagaccatgacaccccagccgtcggcgtaggagtccttggcagcctggatagactcggtcaaggtaccaatctggttgaccttcaggagaagggcgttgcaggacttgagctcaatggccttcttgatgcgcagagggttggtgacagtcaagtcatcaccgacaatctggaagtcagaggtcttgtagaagtagctccaggcctcccagtcgtcctcagcgaaggggtcctcgatggagacaatggggtacttggcagcgagcgacttgtagaggtcggcaagctgctcgtaggtgagccacttggtggggtcgctctcggggttcttgaagtcaagatcgtacttcttctcgtccaccttgtagaactcgctggaggcaacatccatggcaatcttgatctgcccagtgtaaccagcctgctcaatggcctcggtgatgaggtccagagcctcctcggcagtctgaatatcgggagcgacaccaccctcgtcaccgacgttaccggcagactgaccgtacttcttcttggcgagatccttgagcttgtggtaaacctcggtaccctggcggagaccctcggagaaagtgggagcggtactgtatttggtcagtttatagttgcaataaattcaaggctggaggacctactcgggcacaatcatgaactcctggaaggcgagacggccaccggcgtgggagccaccgttcaggacgttctggaagggaacggggaggacgtagggcttcttggttccggcaaggtcggagatgtgagcgtagagggggacacccttctcagcggcgccagccttggcaacagccagggagacaccgaggatggcgttggcaccgagcttgcccttgttgggggttccatcgagcttgttcaggaactcgtcgaccttggcctggtccttaacatcgatgttctccttgatgagggcggggccaatgatgtcgttgacgttcttgacggccttgaggacacctaatttgagatgaggatatcagtttctgatcactttagaggtgtcaaccgggttcattcacttacccttaccaccccacttggtcttgtcaccatcgcggagctcaacggcctcgtgctggcctaggagtgaatgttagcattgaggtcctttttcccctttttaccatctagacttcaaggacaacataccagtggaagcaccggagggaacaatggcgcggtgaaggccggtctcggtaacaacatccacctcaacggtggggttgccgcgcgagtcgtacacggagcgagcgtggatcttagagataggcatgttgtaattggacaggctgatgatagattcagtcagttgtaagaaaggagaaaaagcagatatgggctgatatatggcaaaagctgcaggtgactaacggcgggggaagttcaccgatgacccaaaaagattgggcgggagaggtgagaaggatatgatttgcttggagagagctcaacgaggggcaagttcctactacgatcaccgggaggcctttggttgggtttctgttcctttccagaagacttgggagggttgtagcaggtcgttggagggggatatgtgtactttggaggggtagatgatggtgttatggtggggtatatgatgttatggtggttatgatgcgatgatgctatattcagatactcacctgttaaatcagaacaacttgataaataaaaggagacctcctacggacacacccgactacttaaatactttcccccagagaaaccccgggaaagctcattgctgctccgattctttccaatgcaacagtggggctccacggccgctctccagtactcgctggctggtccgaccttatgcggcctccttagctacgagatctcccgtccctcggaagatattagactatgatggcatcccgttctcccgattgccttccttgttataggacgtgcacatcgtacggcatacccctctacccctctattgcgcattagtctaactgcaggattgtttactgttgtctagaccgatgttaccttcagggctacgtggttcgaaacagaaagtggtcatcttacgtagcattcattcgtgttcattcgcattcattcgcattccttccaaggttccactctgactctggcgaaccttggaagacagcagttggcgcctgattgctaaggccaagctgtctcggaccgagttccgggctaatgatcttcctttccgggcagtttccattatcaattcataaccagaagggaaacgaggactggttggacagtataaaggaaaaaccacaagatataggcaatgcatagagaccaaagggagaagaaaaggcccaaaagaactgaaagtagaggtcaaacagatggaggctgaataaatagggaatccaattccaaggtcatcatcaccacatttatcaagtcttattacatacaagaatagcttgggttcttgaattcaaacttgtcaaacttattgccttacgctcaaggctgtgagagcgttcctgccttaggtgtctgttatgacataagacaactcggaggtcatgtgatcgtctcaatggacgccgcgctggaagctggaagctccccaggcaaggtgctatcttcctaatcacgatatccatccatttcgcatcgaccttatacgaaaccctggattcatactcgaattacagtctttctctggctaccatcccaactcgtccacactcggtgaatctatcgttcgtccgtccttaatcatgagcgacccggagcgcggccaggcgctcgaggaatataaaaagagcttgctcgagctacgagaatgggaggccaagttgaaaacccttcgcttgggtatcaaggatcttcaaagagagtttgatgtctccgaggataacatcaaggcactacaaagtgttggtcagatcatcggcgaggtgctgaaacagctcgacgaagagcgatgtaagtatccaaggctcaagatattcgtttcaatgatcgcattaagaagctaatccgctgtacagtcatcgtcaaggcgtcctcgggtcctcgatatgtggtcggttgtcgttcaaaggtggataagtccaagatgaagcaaggcacacgtgtggccttggatatgacaacactcaccatcatgcggatgctgcctcgtgaagttgaccccatggtgtacagcatgtctttggaagatccagggtccgtcagcttcgctggtatcggtggtctgaacgaccagatcagagagctccgtgaggtcatcgaactacctctgaagaatccagaactcttcatcagaattggaattaagccccccaagggtgttctcctctacggtcctccgggtactggtaagacgctgcttgcacgagcagtggccagctcgatagagaccaacttcttgaagggtatgttcaacttctgaaagcatttacagctgcgatgttctgaccggtctactctcctcagttgtatcctcggccatcgtggacaaatatatcggtgaatccgctcgactgatccgagagatgttcggatacgccaaggaacacgagccctgcattattttcatggacgagatcgatgccattggtggacgacgattctcagagggcacatccgcagatcgagaaattcagcggacgctcatggagttactgaaccagctggacggtttcgactacctaggaaagacaaagatcatcatggccaccaaccgacccgatacactagaccctgccctgctgcgtgccggtcgtctggaccgcaagatcgagattcctctccccaatgaggttggccgtctggagatcttgaagatccacacaagcacagtccaacaggaaggagatatcgactttgagagtgtggtcaagatgagcgatggtcttaacggtgctgatctccgaaacgtggttactgaagcgtgagtgacaaatcttccttcataatatgcgtgtactcgttggctaactctttattagtggtctgttcgcgatcaaggattaccgtgacgctatcaaccaggatgacatgaacaaggctgtacggaaggtggccgaggcgaagaagctggagggcaagcttgagtatcagaagctgtaattgtatctaccttgcggggctggtggcccacatcatctggtgcacggtttagatctttgtcttgaagcgctaatgctatgcattcgacctattcttctattgttgattcaagtactccgtagatcaggggatcttaggaacaacaacttgcctaagtaacagttaaaaaagaagctacttcgagaaaaaatgaaggaccttgggttcgattggtagctcgatgccctgttcatttatgtactcattatatagctatgaggccggttacgcgtacaatgcgatatgatttgcggacccctagtgttgcctctccacttccccagcttccttcaacctgcccttgccacgttctcggttttcgcgccaatttcgtctcgaattagattgaaagcttgttgcgacacttggcgtttatctaccttagcattacccaggacacgcgggataaactccgcgctccgcatctccgcagagaaattctttacggacaacgaaaccaccaaacaaaactgtatcggtgcatgttggcttttagatccgagagaccagattgtctttgcgatcgacacttgttcattacaatcgcgccggaaagggttgtactccggtaagtgtgcaggtctggcccgaggggttagctcctcgtcccccaggctgaggatcaaacctgactaactgttgcaagatacgcgtgtatgaaccttgatatagaatcttaatcaacaccaaacaaggcgaatcctccgatagcacctctacctcctcctgctcactcccatgttgcgcactcggtaatcgcaagaccggcagacaagagaccagatcgaagagaacaatggcctaccagccatcgcgcagtcccttcgcgcccgcgcaacaagacggcttctacggaaaccctcgtagtgggctccgcggatacgggctgtcgaaccagcctatccccctgtccaataaagtgaacggctacttcgaaaaggaccgcacactacctttatacaaagataagccgttctttgcgccgcggcgcacgggtcctcgaaggagatggaagccgttcctcaacgtgctaggggtgtgtacagtcttattcttgttgtattataacttctaccttcgcacgtggtcagggctacagtcaaatgacaagggcgccgaattatggaaatgggcccagacattagaggatgggaaatcttctggggacttgtctgactggactgcaagacgagagaaagtgcgggacgccttcatcgtcagttgggaaggatatgagaagaacgcatggggtaagtcatacagtatccttgtgtgctatgatagcagctgacaccattatccagggtacgatcagtatcgcccagtatcgaatgttaatcaggcagacacgagcggcgggctaggctggatgataattgactccctggacacattgatgatcatgaatctgacctccaaggtccaccgcgcgcggcaatggatctcaacatcgttgaattatgatcaggaccgtgatgttaatacgttcgagacgactatccgcatgctgggtggcttgctgtctgcgcactatctgtcaacccaatatcctgatttggcacccctcaacgacgatgatgtcggtgctgccggtgaagacttgtacattgagaaagcagctgatctcgccgagcggctaatcggggcctttgagtctccaagcggtatcccatggtcgaatgtcaatctcaacacgtcagaaggtgttgtcgtgcatttcgacgagggggctacgtctattgccgaggctggttcagtacaacttgaattcaagtatttggccaagctgaccggcgaggccgaatattggaaattggttgaaagaacgatgaagctggttgacctacaaaagccacaggacggccttgtccgaaccgccatccatcctgacagcggtgcattcaaaggagacagcattagtctgggtagtaagactgattcttactacggtatgttgatagtacttggtgcccgtagttctttcaagctgactcgctctagaatatctcatcaagcaatacctgcagacctcagaacaggagcccgtctacaaggaaatgtgggatgaagcattgagaggcatccgcaagcacctagtctcattcaccaagaacgctcagctgatgattatcggcgaacggccccagggcctaggccaggaactgttacccagaatggaccacctagtctgcttcatgcctggcacaatcgcactcggtgcgacaggtggccagcccttatcccaagcccgaaagtcagcggattggactcaacagcgcgaggacgagatcctcatgtccaaagaattaatgaagacctgctgggcaatgcaccaggccacggcaaccggcctcgcagccgagatctcccacttcgtcttagactcgtcgcctgtgatgatggcagacaagtaccccgatccagtggcaaaccccaaccacgcatccaagcccgagatactgcgcggcatttcccagccactagaggcgcaaagcgatgggtccgagccctggcgtgcggacatcgacatccgccgcaacgaccgacacaatctacaacgcccagaaaccgtcgagtccctcttctatctctatcgtatcaccggcgacgacatctaccgccaatggggctgggagattttcaaatctttcatcaaacacacagccgtggttgaaaagaaaagtacctcctcgcgtattccgacatcaaccaagacagcacctgttttccgtatcaagggctttacgtcgcttggaaacgtggatgcagtcccttcatacaagcgcgataacatggagagctattggatggctgagacgcttaagtatttctatttgttgttctcggatcgggatttcatctcactggaggaccacgttttcaatactgaggcgcatccattcccgcggtttaagcctagtggggatctaaagacggggtgggagagagcgcctagaaagtagatttcgtgggcgctttgttctaatggagccttggttggctatgttttgatgtctcttatatgttccgtatagcgcttttttccgtgcttttcctttgccctctggggaaacctagatttgtataccaacatgctgtacatggccgatgttactttctgaaagcaatactccttgttcacattagcattttatatgtaaggtaaaatcacctctattctgctgggacttgaaataacccaatggcgggacctagtaaccgaaattatgtgaacatagctccagataccacacccctaccagatgatatacaactagaaatcaatcatacaaccacctcgcccttagcctctctttccagcgcagcctcaatcaactttttataaccaaccacagcctccttgatctggcggacagtcaaggcctcattatcaccatgagcaacaaagatacttccaggcccatacaagtagcgcttgacaccagggccgacagccagattcggcacatcagtaccgtagttaacagtcgtaacatcaaacccatcaacatcaacatccaaatcctgcggcgggtaagactcgccatgcgaaacaaagtccacaacaacctccgcctcgaaaccccgaaccgcctcctcaacagcgcgctggataatctcacccgcctcagcaggcgttccagcggcaagtctcacagcaacatccgcccacgcctcagaaggaacgacattcgtcgcgacgccagcgcggataacgccaatattcagcgtcgtcggcccgtacttcggggaggcaggcaggccgccctcttcggtggggatatcgccgagcacgtcgacgcgcgagagcgcaggcagaatcgctgacacggcgctcttgcccagccacgggtatcctgagtgggcggcgctgccgtgcgcaaggaccttgaagccgagcatgcccttgtggccggcaacgagggctgcctcggttggctcgccgaagatgatggtgttgatggcgcttttcgcgttgaggcttgagtccgagaagagtttcatgccatcgccgccgatttcttcgccgaccacgaagagaaggccgagcttggcgtctggttgtgaggctagggtttcgagggttgcgaagatttgggctgcgacgctgccctttgcgtcgacggagccgcggcctgctatgatgaggttctctgggtcgaaggtggtggagtcggagatgggctggtgcacggagtatgggatgaagggcgggactgtgtcgatgtggcttgtgaggaggattgaggggggttgtgtgtaggattttggaacagcgtagatgttgtagcgcgtcttggttttctcttggtccttcactgggggcacctcttgcttcaccacggtgaagttccgggcctccaggaactgcgcgacgaagaggccgacatcgtgctcgttaccggagagtgactcgatctcgaccaggtctcggtggaacgacagtagaggtgaactgctgattatatcatctaggcctgcttggctgtagctgggctgggaggaggatggcacgcccaggagttgttgctgaagtgcggggtgcggagaagcctggacgccggaaatgatggccgcagccgcgagatatgaagagagcttcattggaaggtcggggtacaaatatgttccaattgttaatttgctgtgtccaatgcaattgaacagcccctacgccctgaacgttgagtgttttgcgaagcttgtagatcggagatccgaggtcggccccgatgtatacggtcacgtggatagataaacatatcgaccggctcgtcctattggccacatattatcaggtctgtggtgctcgttattgcgtgatggattcaatgtcagatacaatgccagatacaatgccagatacaatgccagatgccttcattcacgtctatttcattcggcaaattcctaacccgacaacatatgtatagctcgtattcgttaggcgagctggcccacccagacgcgccgattaattcaagtcccgaagctctacaaatttagcagaacaccgagtggatattattggatattattggctgtccaagctttcctagaacaaggaaatcactttgattcgtgaaagtacatagcacagtctaacgctccgaagctaaattaattgtctccgatttaaacgggtagctcgtgttaatggatacactcgcgattcccgggtttaaaagtgatctccgtgcatattcacttcttataatcctatactagtgaaaccggcctcaccgaggctatgagcgtcattgggctcgatgctttcaaaagtactagaatagtgttggcacgacgatccaaaaacacagccctcggactacacatctcagccagccacatactacttctatgatcagccctacaactcagttgggttaacacatttcagctgggtatttttaaaacttaatacatacatattcggtttcgaacactaaccttagtgaataaagccgacaccgaaatcgtttgtacgcagagagaactacgtcgacgggcttcgcgaatcaaagctttacttttaacaggaccacaacgctcacccggtctatccgatcgtgtattgaaccaatttgccaaaggctgctagcttgtaatgtatagcgctattttattgggggaggaaggaatcacatatgtaccagctgaaaacgaagagaagtaaaagtggaccggatatagaacggaaatacccacctacccacccagggagggagccctatcgactcaagaagcttctaaatagattaccgaacaggtggaactcgttggtggaagcaattgaaccatcccccccctcccccctgcctggcatgcatggagaaccggaatctgctctagaaccacatacgcgctgaacccaggcgtagttggtgtcagataacagaggatagaataaataggtgtccagatagatattcattctagtttaattaatttgatggcgtttaggtgaaatctatatctcaaatccaacggctttggttgggtaaccatctcgcttattggatacgtttataagatctttagtacccagatatccacctcgtatagccctgtgtcgttatctacggagtactccgtatgttttatagaatcaatgttataccggggtatcttattgcgcacattcacgagggatatgagctggaaacctgcaatgatgtatgatcgacatgcaccatcacaacttggcatacttgaaaattgtgagttcagctcgttgttctgtattggacccacctgtcagtcagatattcacgttcccgatgaagcccggcactgatggcccgggagcgcggatgggttcgatcgttatgaagccaaaataaagcatactaatgctcggtaccgcgaatacgccccaggtggggatgagactaatgccataggagcaatgatctacgcgttcatgcttgtcacttcatatattatacatcgtatgtggtacatagtgacaataatgaacggtgattggcacatcggtgatatgtttccaggtgatataaatatggatgcccccttcagatgagtatttctaacacagcattcttactacgttagtttacttgcttcctgacatccgaatcattcatcctaagcaagaacatggaatcttttcggaaaagactgcttgcgacaacgatcgatgagcaggctgaaaccaaacccactcaacgatttgcagttatttcacagggattggacctcagcaatgggctccgagacatttcaatcaaagacctggcacaggccgtgaacttcatgtgttggtggattgagagcatcattggaccggcacactctgactccccagagacggtggcctatatggggggcaacgatgtgcgctatctcatcttctttcttgcatgccagaagactggatatcaggtaaggaaacatgccactcaaactgagaatagaacagccggactgactcttataggccttcttgccttctaccaggaactcagacgaagcgtatgttcatctactgagcgcgataaactgcacaaagttcttcttcggcgaggagcgtcaagaacgagtactggagatacagggacttgttccgaaattggacatcttccaggccccgaccctgaacacaatcctcagcgacgagagtggtctacgccactacccatataccaagtcctatgccgatgcagaggatgacattgtttgcatcatccatagctctggaacgacaggtaaatcccatgaacgtggcactgtgactatgaaccaagctaattcccgacaggcatgcccaagccggtgtatctcaccaacggcttcatcatgacctttgattctgtcacttaccttgaaaagccaccaggtcgccggccaaatacattccacgacctggatcaaagtcagctgctgctggccgcggcacctttcttccatctgatgggactagtaacattcatcttctcggtgtggaacgaatgtcccatgttcgttgcccccgataagccactctctgtcgactatatgatagagctgctgagcactggccaccccacagtcgcactcctgccaccctcggtcctggaagatatgagccaatccgagaaagcactagctagtttgaaagaagtcaaaaaagtgtatttcgccggcgcgcctctgcccctagagatcggcgagaaattgcgcaagtatacggagatcataacggtaattggaagcagtgaggccggcgtgatcccagggctaataccggaggacaaaaccaactggggctacttcgaatggaatgaagactacggagtggaaatgcaagacaccggcggcggcgtgttcgagttggtgattcctcggaagaaggattctcgcgactggaaggccgttttccacacatatcccgagctcgatgcgtatccaaccaacgatctcttcacccaacacccaacggacccacgtctgtggaagttctgcgggcgcaaggacgatgtgattgtcctcagcaatggcgaaaagtttaatcctatcgggatggagggtatcatcgagggacacccgctggttcggaaggcggtggtagtcggccagtcccggttccaggccggactgctcgtcgatccgagtcctgcgggatgggatatggacccgaaggtctttattgaggagatctggccggtagtacaggcggctaaccagaccatcgcggctcatggccgggtaatgaagaacaagatcaggctcgctgtgaagacaaagccattccagacgactcctaagggtaacgtgcggcgccggatggtgcttcaggactacgaggaagagattgatatgatatataccgaggacctcgtggatgacttggaccagtctctaccgcagacgttagaccatgagagtcttacggagtatatccgccaggttattacccgtgtcctggagaaacccgagatcgcagatgatcaggacttttacgctgccggtcttgattctctaatgaccattcatgcctctcggatactgcaaaagggcattcagctacgtcggccggatgtagaagcaggagccatcaacgcccagacgatctatggcaaccccacagtcgaccgattgtctcaatccgtgatggacatcttagatggaagagcccaagctgatatcccgcgagcagagaagatcaagagtctgctggagaagtatacgtctgatcttccagtgcgggaagtctaccgcgagaatggattgccctcgccttcgactgtgattctaaccggttcaactggctcactgggtacttatctcctgcatgatctactaaacagcgattccatcaccaagatctactgcctcaatcgttcggatgccgaagcacgacaaaagaaaggcttcgaagaaaaaggcttacacttcgacgaaaacgactggaaagacaaggtcgagttcctacaagtctcattcggagaaccacaattcggcctggacgagtccaagtaccaggaacttctcgactcggtcgacaccatcatccacaacgcctggaaagtcgacttcaaccactccgtcgattcgttcgagggcactcacatccggggtgtgcggcgctttatcgacttcagcttgaacagccgcaacaacgcccatgttcacttcgtctcctccatcagcacggtaggcgcttggacccccgacaagggagatctggtcccagaagtaccgatcgacgacatttcagtcgttctctcacagggctacggcgagtccaagcacattgccgagcgcatctgtctcgaggcatcgcaaagatctcaagtccccacgtcggtacatcgcgtcggacagatcgcgggaccgactagcgcgcgcggacagtggaatcgacaggaatggctgccgacgatcattgcgacgtcaaaagcgatgggtaaaatccccgaccaactcggctcggtcgcggtcgattgggttccagtggtaagtcccccggaaattatgattcactagctcagccaagagaaaaaaattttaattttctaacttgattttaggacacactatccaatattatagtggaaattgtcaacacacgtcatcgggactcctccgaagcaagatctgccgtgtttcatctcaccaatcccgagcagacatcatggtcgacgttgatcccggcggtccagagcgagtatgcagtcgagccagttgcgttctcgaggtggcttggcgagctggagagtatcaccaatcccagcagtgaggaagttgcctccaagccggcactcaagctgctgggtttctaccgggggttggaaggcgagggcagtgccttgtctgtaccgctggatgtccagcggacgaaagcggcaagtgccagcatgagagcgctaggcgcggtctctccctcgttgatgcgaaactggctgcagcaatggcaattctgattaatatagcttatattggattatatctcgaattaatttatctcatgtccacggtgtatattgcttccaaggttatcgtaaggcttgaacatgacataagtcgtgactgtgcgcgaccggagcttcctcattgggtgattacctcagaaacccacccgattaggtttctttttcgcttggctgggtcggcttttgctatttgccgagcggctgtgattggtctgcagactcgggctatgccctttttgggctgcagggtggtctgttcggtgctagttctctgcagggatgccttagcgagcgatgcgatcggagagatctccaggggcaaaaagaagaacgaaaggatttgatatatcttgatctgtcaacagatatcgcaacaagcgacatgtcgcccgaagaatcaaaatcgacttatcgagcgtatcttcagggctgacaacctatctgtcgccctgaacaagcccgatcccccgatcgccgcgccaaggctcgcctcccaacccccaaaggcacacccggcgggcagaagcagtggcgccaaacaccatggttctcttcccttttccccttctcgcccctccaatcattgcaacatatgatatgatggaatgttccccgaattccccgagaacgttggttcgagccatgtggacctgacgtctgccaaaggggactttgcctttttctttctctttcccctacctctcccatggtacggccttgggtacctattcatattttgatgggattatgattggatgttctttcatctagtactacttgcggttgtatggaggtagtgctctgatgtctagtccaggtctagttcggagttcaagtttatcgtaggacggacagcaatatgatagtatacatcattccgtgccctagttatgtggtatataatttttcgaaccgataaccctccattgtgcgacccaactcgtcatactcggacaaagttctgacctccacgggacggggccttgtccgcggttgctcaacgttgtcggagctctacaacgtacatatacaactacaacatacaaacggggtggatgcaccagtccgtgcgtaggagtatacccggttattcgttgaaggataaccgagtacggagtaaacagacaagaatagctggagcggatgtatccaacaccttttccccccaatcctgcaaagcgaatcagcaccgatcgactgggtcgcaatggcatcataaatggttcccctcttgcatccacatcagtctagattgccgatcgcacacacagggattttggatggagtccggagtattcaattgagaaaagggtcctggaggaggggatgtagaacacattgggctacacggcatatctgtgtagccgttgggggtggtttgaaaaacaatcgaattagaagggatcgtacattgagtccttacgaagttacaacataacatgcatggataaatataaatctaaatatgaaaataaaaataaaagaataaagaatccttccagactctgctgctaccatggttcaagctgtgtcaaccaccggaactagacggagcgaaccttgggaaaagaccttttggatcggcaacggtcaatttgggtttagtcaccttttctttttttttcttttttttttttctttctttgggaatccgatggaattctccactgacagttgtttggtctagagccaacaacatcctctcgattcctatttccctttctcacatatctcctcttcatcttcatatattcatctctgtatccattccatatatccatcccatctgtcctgctctacaaaacaaagccagaaactgtacgacccaggatctccctgttcccttccccagtccgtttgccgatgtaagcaaaagcaccgaaacctctctttctgcccagccagttagtctcatcaacttgtttggtccacgtcgctcgggggaattcattttcgttttctttttcccttttctgtatttcgaatttctgtatttttggcagccctgcctggacgataatcgacatttccccgtcttcatcggatgctaactggtagaccctcagttcccgcgtttcccggactattactactactatctttccatcacaccgccacgtcctttcccgcccaaaaggccattgagggaatgacttgttcaaactgagcgttgtctctcttttatattgtggccacccctcgcatccaatgctgaacggcaacaaatccctatataccagccaccccgtccaagcggcgctcacctcgtgagaatgtacaaactgtctcaaattatcgacgcgacacgagaaagtctcgacgcgctcgaatcgcctctacgccagccgcactctccattgactataaatacctccgcgccggcctcgcctgctgtttctttgttctccgccgcaggccacaaccgggtctccagctcggtctcgtccttggtctcttcgtccggtctggggaactcaatggacagttccagtcggagtcagttgaccggagtcaaggaagaggattgcacacgcgactcattggaagatcattatttccgtatgtgcctatcgccaaaactcccccgatatgcagttgctaaccagaccttctatagaacactttgatcgcatgtctgcggcagattcatacttttctcccatcgataactcagatacctacgatctaagtgtcactggcatggagactgccccatcaccgaaaaagaggcgttccggctcagacactatgtcattaaagggcgtctcgcgcattaactcgcacatctcaaccatgtcagcccggtggaagactaagcgatcctccagtggtgatggcgatacgttcccggatgctctacggtctcgcgcgaactccgcggcctcctccgccttggcaagtcccaccactgggcctgtacctgtgagccgggtcgactctattcccccttctcccgcgcgaaccattttcgaggagcgcgcgagcgagtcgagcgtgcgcccaattgatatcacccgcgcgaacagtctcagccaggacgacaacgatgtgcagcaagcgacaacccctctcctgccaccatttatgagagacgacccaatgagcaatgcgtcccgcgtccagtcacctctgcagtctccgtcagtcgcagatgcgagtgaagcagcgtactataactgtaatgtgacctcggacccgcggtttatgggaaatcttccctccccaccactctcgtccaagccttctgtggcctccttcaaccggccacgagccagtaccgtgcgcacagtctcaggcgatgtaacgcccctcgtcctctccgatcccaatgatgaatgggccaacaaactcggccacgccaatttcactatcatgcctgagccttatgaacccgtagtttgtgacctcggccatttccagcagctgcggggagactgggacattgcgcgttgcaactttgccaagcaccttgtccgcactggcgaacactacggtatgacctcgaacatctataagctcaccattgataaatgggattcgatcaaccgcgagtgggcaaagcagcacgaggccatgctcgaccagctcagcgcgatagatggtgttgctctcacgctcacccattccaatatccacccttgccaacagctccgtatcccccgtctgcatgacaacgacaagttccccgagatgggggatgaggatattgtcggcccaatgactgtggcaccggctgcggagcttgcaggtccctgccgttctgagaaaaagagaagtttcttccgctttttccaggacttggtctcccgaccttgagacctgagtcttcgttaggctcttgtcttttgtctttttcatttccacattttcaagcgatccgcaacgataatgacgatagattattccccgcgcgcattctgactcgttcaatctcgcccgcactgttacgattaatgtctctcttttactcttttctttttattttttctgtaatgactctcatgactcacgatccggatcagcgactactgtctcgccccgcatcatgccattcttttgtctatattgcgagtcttgtcttttctgggggctatcttttcttctctttcttggtcctggatgtcttcctgcgtttccaccgaagacatccacttccttcaacagccgacaagaaagagaacgaaaagtgaacccctaactgactgggtgtgccacccttctccttgattttgtctccattacatactataccccccatacaccaagcctaccaaccgttgtaccccatagacttcaaccttactcatatctctgcttcacagcagaacaggacaaaaacgtgaaaagcatctgaaaaagtaccatacaatgtttctatatgtatatatccgtcttgatttctgcacaatacacatatgtttcatatacgaatgtcttattacatctgcatctaattctcaatgaacataatattatgaaaccctcatgtccatatcatttgaagggatgacacggtgcataatagaatcccacgtggaaaagacacttatcggatatgacctccaaggctactgttgcatgtgagtcacatggagaataaacacggtggagagaaagtgacctggtaactagttagagtggatcagccacgttgtgctcttaataataaagagaattcaccccgcgtcataccccgatgcctcgcttctggatgactcttccggtgagactaattttttcacggcgggtaagatattctcgccataaccgcggggttcagccctagtactatccgaagtaacaagttttcagtatcgaacttcgtaagaatttcaacttgatatacaattgaagcaattaatcaaagcgcggttctacaaccccctaaatagtgactctaactacatagcctagaccatgaaagaaaagaaaagcatacttgctactcctagttactccgtactcacgatattagactcgcctagactcggtcatgtcggtctgggctagtgttatcggcgctgcctcgtctccataaatcctttgtgagaatcctttgttgtacgtgagaatccttgcaaaaagttcttcgactcgttctaggaaggatccggttgctacctaagtacggagtacggagtactccggtggatagatgatagatagagactagatactccattgcctcgggtgtacctgcctcgctatctagagtcttattgctaagccatcttgtaatgatccgaataaaaaagtggcctcgggatgaagtaggattggaccggtgaggcaccctaggtacatacagcattgaattgggtcttgttcaattgccataaaaactagttatacaggcggcatagttagttagataatctaccagatcctcgctagttactcagtcaggatgtggtaacaagtgcgctcttaaccctaagtcttacaaaaaaacatcttgtgtccagcgggtagaaaaaaaaacagcaaaaaagtgagcactgagtgtggatcgaacacacgacaacctgatttgcaatcaggcattctaccactaaattaccagtgcgccagaaccctagaccgctaggctattggtcctgttttgtgatttgttttatggtttagggaaatataacatacatttcgtaatgctcaatgtatacaactagcatccggcttgtttttcaatgcgacagacagcttgtgcacaacatataattgtatgcaaatttctataattacatctataaatatctacaattctcatcatgaatataatctatgaaagaccatgtacgtgtcctgtcattagaaaccctggacgacacggtgcataatagaatcccccgcacgtgggagagacagtcggacatgaccactatttaccgaggcatagttcaagcggaaagcgcgctgcatatgagtcacatgtatgtatgtagaataactagttaacggtgcagggaaatggtttggtagagtggatcggccacgttgtgaagctaccgccatttgatcctctcgaacggctggattgggcctctgatactgataacaagtctgcatggtccaatccgtattgagagtgcctcggtttaatctttagttaggtcttgagattgtgagtcagagactctgtctttcagattcagattgcgtctggatccggtaactagagtgtatgtaattgattgtgtactgagtgcgataattggtcgcttactaccatgattacatgacgtatacctatgtatgtgttttatgcgccattctcgggatatatgtaggccatgtctgaggacatgcaagatattccaaatcgcattggatatccctccctcagcctcgggatccaggcagagctgagaatctcggatctaagattatcacagaaccgaaacatgcattgaggcagttgagatcaatattcgcgcatttgaggtccggtgaaactccgccaacagtaataggcctgtacacacgagctatgtttcagcttcggagcatgcagatagagagacaagattgggatgagcacggcgcagacagacgtaagcataaacccgggacttgaatatggcaagcggtaggcgtatataccagtctggtactttcaaacccagtactggccccagatgctctttgcctcttcgttgccatggaactggaactcgacggggatgatgtcgtcaaagccctcgtgcagcgttggtgcgcggaagcggcggccgaagtcgccaaaggcgatgccgggaagggatgttcgggattcggggttctggttggaataagaatgggacaaggttagatggatattgccaatacataccagttctttgttggatgctcggacagcgttgttatgccgacataggtctggcgtcgagataaattgtacgcaacggatagggatgttgagctctttcgcgagagatgtccagtgagctcgcgtttctgggtcggcgttggtattatctagggtagtcgggttagatgtgggaaattgggaaactgagataaatgtcactacgtaccgactgccacggacttcttggcttccaaatactcgcgggcgaccttgaggcatttcggacgctgttgatcatcagcattagatttggtttcattttaggattagcttgaaaacgcaccgtcttgagaagatcttggttgactcgttcatagcctagaggctccaaatggttccagtagaaagtggactttccggcacctgggctgccacagaatattacaagctcgagtgggtgcttgcgagtaaagggtttggctgcgatgaagacctgtcaacactctaccagagttgggctggggataccaagttctttggaagaaagactgcacatacccggctcttcgagatctgactttacgaaagagatagggtcgaagcccaccgtcgccggctccgttatctgcccgaggaaaaactcctccggggtcttgaacggcataccgatgttggtagcaagtcccctagagcgagatcagactttgtcacaaaacaacggggtcatggttcttaccgatctacagctgaatgatcacctggtcttccagccgcatcaccgacgaaaaccgacgcgggcaggtcaacacccgcaacgtcgaaatcatagtcgtccaggaactcgcgccacatgccgagacggggtttccggtattcagggtctgtcgtggccgcgtagacgctgacagggaagtccagttcggtcatgacagcggtcattttttctttaaagttcgacagacttttggagtcactccgtccacccttgatatctttttggatactgatcttcttttggttggagaaaatcaccacttggaaactgtcgaagtatgagcaagtggactcataattaccgagtctgaacatacccttcagcgttgagctccttcagtcggcccgggactttggtgttccaccattgccaatcagtggcagatttggggaagacattacccgatttggttttgatcaaggtcgaatcctatatcaacgtcagtgggcctatctctcaacgctacccgttctagcgttcagttcaaccactgaccaagtcaaagccagcgattcggcgctgtttctcagcgggaggcactgtcttgcccgttgtctgctttccgatgataacactcgtgccgatgacgcgccatgtgatcggttcgggcttcttttgcgaggccggggtgaagaagtttgccgccgatttctctgtaggtcattttttagtagtagccagcatgctagtgggtagtaaagactcactggttaccgtcgagtcgaccttgcggcgcagtggtggtggagagatgccttggggggaggcgactctcttgactgcgccctcggccattctgacagtacgggcgagtgaagacgtcgtgaaggtctatgggtaaatttagatgcgtgttggttgattcgatcagttctcgctgtgagatgcagttgaatccgagatatacgttggacgcgccgagacgcgggagaaatcacgaagtcacatgttctgaacttaaggtgagcatttaagttgtatgccaaatgtacgagatatatataacaaaaataaaaaatacatgaggacggtcatcttaaaagaagtgaacttggaatagctgatgatcccggaaaggaagaaagaatgtcaagcgctagaggaacatattttgacgtcgaatctggcaagatttatttgtaactttttttttggcttttgagataggacttgcacagattttcctgctaagccaagtcctactaggacagcagtacaggcgttgtatttctgtgggattataggattaggtatgcttctatatgcactcccaccgagaggaacgaaaatattcagtcgacttgattgctatgatgggtatatttttttccaataaaaacaagctcgagtctatcaacgccataccgtcgctggagaccgggtattcgtagtctccagcatgctcgcaaccgaaaggtggccatctacttcgcccgcgtatcaagagacaatcgatctgcctgctccaggacaaccgccgacttcaactgttcgcgcaggccaaagagatgctgcgaggcagtcttcatcgtctcctggttgctaccatcttggacaatgatataggcctgcagcacatagcttccgctcttctcgaacaaagtcatatccttcaaaggaggcagctgtcgccggggcaggttcgatccatccccacccggatagtgcagcacgcgatgcaagaagatagcaatgtcattatggatgaacatatcaccctcgaccacatactcagtagtgaaactagaaccagggttagagtccgcgatcatgagatcgattcgatgacgccactcacttataaccccacgcattcatagcctgcacgatatctccccgcggtagcgtggcgctcgacatcagacgcgacgtgaccgccgagcgggtgccagcttccgggatatcacgaaactccaacttccagggctgacgttcatagtcgtaggaagatgaagacacattaggctttgaatcgtccgtgccggccatctgggtgtctccatcgacgggggcagtggatccgaaatccgattcggaaaccggcccaaccacctgggtgtagtacatattcccgttgagcatcttgttcagccgttgcaggtccgcctgttgcaggtcctgactggctccggtgcgccccgccatacccggtttgcggtaggccttgaagatcagccgccgttctaggcaatggcggggttgcatggcagtcagcccggcaagttgctgcaggagctcatgatgttgatggactggaaccgaggcgaaaagcgactgctcgtgcattgtctgatatgtgtgtaatgtagcgggtgaagccgggagatgtccgtcagggtccaagctcctggtggcgcaacctaacgttatcaaagcgatcagactattttttatgtgttgcagctattgctaataatcatagcgtttacggggatgtttgctgtgtttgccgtgtttgccgtgtttgatctgtgatctgtgtgatttgatattccttagcagcacggagtactccgtagttcaatattggattctattgaattttccgatgcgtccatggtatgagggaatccgaattccggtgcgggcagggtccatggatgccccaaggccgccatccagtggcaatccgtgacttccttgtgcccaaggctgaaaggcaacagaaggcaaaagaaggaggagcccatggagagctcaccgagccaccgactgggaaatgaggggaagaggctcggaatctgcccccgaggccaataccgctgggatatggcgtgacctatatagtcttctccaataccccaggcccaggatgtaccgaagtagttcacccggtcccgaatcggctcctagttcttcttatcttctcgtcttttcccctctaaagctattaattctcaatatcaccttctcccatatattcagatctcgttcttaccgtcaaataactagaaactattcccttgttgggtgcctcgttgctctcggtcggattcggataccaccggacccggtcaatttcgcacattcccgcattaaattgatcttaccatcttcccacctcacactctaataactacataactgtcaaaatgcgtgccacttccatcctccgcagtgctgcccgcactcccctcattcactttattggcaagcgctccgtgccaagtacgtcaaatccttgtccgagctccaatcctgagaccaagctaacctcctcccagagtccattgaccactctcctcgtgttcaccccgcctctcccaccggctcgctccctgactctttcgccacctaccgtgctaaggctcagcagcacggtcccctcggtcgctcctccttcaacggcaccattggcggtcactccggtgcttccttgggccccgtcaagccccaggagggcgagttcttcgatcgcgccgagcttcccgcacgcttcggccgtctgccctggaccgaggccgagatcgaggccattgagaccggcggcgcgagcttgtttgcataagcgtcctctcgggcgaaataacaattgtctcaaaatgtatgaatggggcatacttccaatggaagttgcgtgacgggcgagcttgagtcttggatttggatttggggcagttgagcgcggtcacgatctgacttgggccggggcagccaataccttgataccttaccggtcgctaggacacggatctgacgcatgttcactcgttccgaggtttccgagaccagacactctcactttatactctgttccttgggtttgaagcccatctacaaggtcgtctttctctagcggtcattctttgccgctcttttctttcctttcggtgtttttgcactcgtacccggcgctggtggttgctttttctgggtgttctatttccatgcgcacatgcagctgtgtcgtcctgacgtcgaaaagcagagtcgcgttcgtcttatacataggttgtggtcaggacttggtgattcttgttacatacataggctctgtgagcactattcaaaatgtatttctcgactaagcttttcattagatgcataatactagaatatatacagccgaactatagtcttagcgtaagtatcaagggtagcaagtacgtggtctcaagcacgtgcctcccggctctacctcaattcgcccttgtagcccttgactactctcatcccgacgtctaatccaatatgggctctcatgtcagcgagacgaataggctgacattccgggagacggacgaggctggaaatcctactgcaacctatatctactcgggaggtgtcgcttcgatcacttcgacaccgacgggccgagtagatgtaatagtaagttatcatttcttgattcatattggttttctagcactggacgtttgaattgcacgcaaagttccagatatggtcgtcatcttgtggactggcgagcatcccggttgtcctggtatgcctaccaatcgctttataatgaatatgttcctggaacaacacatactctgttttgcatctatagtacatgaaatgtgctcattcaatctcgatttatggcattgattcaaaatatggatgtcactgcatgattcggaacctacaatgctatatcaatacctcaaagtcctcactgttgactaacctagtataacagagtgcctctccatcaacctcaccatggtcagctaagcctctattcagctccctgagtgatgtttttctcccttccggatatcctcaaagtgtcagcgatgactatctcccgtgagtacagcgttgagatatatgaaacatccctgatatataaacattgctaacttcagactagatatcaaatctttgtgagcatcaatccccggctgcaaactggttgtcacagacagaaccctcatggctcgaactactggctctaccatatcaagcaatatcaaagatacacctaggaaagagacctaacaccaatccaccaggactcccttcaagccttctgcagctcaatagcaggcctcctctcctccagagccgtcctccaaggtccatatcccacatccaactagaagacaagcaactaacatccaaccaaaatacaggagtcggcgtcggcaacgccaatgcctctccaacctccgccctactcctacacatcctgcaagatatatcaggccgcatcgcaacgatctgcttcgcccaccgcgtcggcacagccctcgagccggaatgcaaaacctaccgactagcagcagacgtctttaacgatatcgccatgatcctcgactgtctctcgccgggtgttcccgccggaccaccgcgagtgattgttctcagcacagctggtgtgcttagagctctctgcggtgtagccgggggtagctcgaaggcgagcttgagtgctcattttgctaaatgggggaatctggcggagcttaatgccgtatgtgccatttcagatttctgtgcactgtcttgttaggaaattgacagacagggctaacctatattttgtcgtgtagaaagactcgtctcaggagactgtcatttctcttttcggcatgctggtaagcatccatccctaacccaaagaatctgccctaacaaacccaggtcggatccgtagtaatctcccacataaccagcttcaccacaacctggctcctcctcctcatcctgctagccctgcatctaagcatgaactacgccgccgtgcgcgccgtgcaaatgacaagtctaaaccgccagcgcgcgaacatcgtcttctccgccctcctcgactcagacagcagtctagccctagccctagatcccaatcacaatgtcgaccctacggccacaactacaccagagaagaaaaacaccctcctcacactcacaccagcacaggtcgcccagcacgagcgcatcttccaccgagacggcgcattgcagtggacgcagcatacaacaacccagcacctagggtccgcgcagataggcgtgtctatgtctacattcctgggtaattccgggtcaggtaggacattcccacgcacgctcccgctgccgcaacttgtgactgttttcgcggatgagtattatttgctgtttctcgcaccgggagggaacccgaattcgaatacgaatgtaaccaaatggcatgcttcgattctcttgaagccgggctgtgcagtcgagcaccagttgaaggcgtgggcacatgcgttactggctgcaagggttctagctctggtcgggatttcaacggagtcttcttctgctgatgcggttcttgctgttgtggagaagacgcttggcttgttgaatgccgatgcgcgattccagggatatatgatggcgttgaggggtgtggggtgggatgttggtattgcggctttggagacgagggggggacggaggattgatatttgattatttacacttacttacatcttctatttcttctatccatacccggaactttggctttcattcagccttcaacctttatcccattctacactcgatcctatcctataactacatatggtaaatgcaatgaaagccaccctccgcagtgccgaacagacatcccattaacttcgaaaggcagcggagggttacgtgtgcatctgtgctacaacactagaagccgatctgtacgtctccccgggctctcgctttcggccgacatgtctgggtgtaggtgtctgacgtgtgtgacgagaatgatcgagagaggtctagacaagacggttggtttcggagttgaggggggatactcggatgcctgctgggaggacgggtggtgtgatttgattccaaggtgtttagttaaattgaaacatgtgttcagaatggaagagtcgaagtcttggttaattgctgggtttggaattgccctgacggttggatgcatggcctatatatgtatgtgtatgtgcatatctgcatgcgaattcaacgctacggaggacagacactggagtacatgatatacttttgtatggtttcactgtttgaaaagtaatgcgaggaggggtatcaagtctattgattccgaatagaataaaatcccaattttgggagatgagagaccaagacatgtctcgaccaaaacgccgtgtgtccagaggacctgaaaagccaccaggtcctctatccaatctatagatgagagtatgatatgatatatatgggtttcttttcccgatgccaaccgccaaaaaaccatgaaaaaaagtgacaagtgaaaatgaaaatggaaagaggatgctcagccggagacatcccaaaagaaaagaaaaaaaataaagaaaacgccggtttcatatgctttcaatgcgtcatgctctcatacaccgccaatataaacgctcgacaaaggctagaatgaagtcgtgggatgatgcatttcatgcaagtgtgtaatgatgagaagagtcgttgcgaggttcgtagttgtcgtaagtccggagacaaaagggtgtgttttgggatctcgacaagagtcgggatcaaagggagaaaagagaagacaattaatcgtcaagaccaagaatcttaggatcgcgattgctcccgttgctgcctgtagtggagcgcttcttgaagccaagcttcatacccatcttcttccaagggttctcggtgcgaagcttaggactgtgcatgggaagatgcggctcgctggcaggcggtgtggtgggcggcgtcattggctcctcagcggtggggctagagctggagtcatcggtcagcgacaggtaagctgactccccgctggtgcttccaagggcgccggaggtgcgttttccgagggcatgcatggcgccgagggacatggtcgagcggttgtgacccgttgcaggaagatccttggtagacgactgcggggaggtgcgcttcgacacgcgcgaccggactgttttgatcgggtgctcgtctaggctcgtcgatgatagactcatgaagtcatcgggccccacaaagggatcggaaggacccatggagggggaagtggtgtggctgttgacgaaggggaggaagatggactcctccatcaggtcgtggatgcgcttcacggcggaatctaacgtctcgggcacgggcggcgcggtcacattcttgtactgtaggagcgcatcgcggacttcgctcgacaggttgatctcgcgcggcgacccggggaagatgtatgcagacagtaggcgtttccagagcattcgcaggtgctgattctcggggcagtccgattccaaggcggcagggcccagtcgtccggccagagcgtagtaggaatcccggtagcggttggcctccatggtgaattccaatgtttcgagacagtgattctgggagaggtaggccatgaaggcgctcaaggtgtatggaggaggagcaacgttggccagcacctcgttgagcgtcgggcgcatggagaaggcccccgacgagatggctaggctgaccggccgggagccagaagattccatatcctcttcggagtcgctgtctgaggaggtgggggacaattcgggggttgcggtaggagtatggttccgaaagaagagagacggagccagcgtcttctttttaagcatagcgtagagtgtgcgtcggggacctttgatcggcttttttctcaccggtcgtcccctgcgtgtgggacgaggctccagcttgagatgaaagagggttatcgggatacaggcatataggatgcgcaacacgggatgacaggaatgtagggaacgtagggaatgaggtagagtgagtcgggtgcgtatagtttggagaggcaatataaaaggtaaataatagaaagtggaaaaagagaagcggaaatcacagcactaaagaagaagaataaaaaggtgcaaagggcggattctcgaatcattattcatgacgataccttgggtaatggtaacggggccaccctcagtagacttaagtggggcctatgggggacgctaaactagtttctgcgcccaagtgggggccggtggagtcgtctttcgataagatgtcattattatttttcttttttcttttctttttccgtttttttcctgtctatttcttcattcggtttatttcggtcttttcgcgtcgtggaatttcctgattggctctggctctgtcttattgtggcaacacactgaactctcacgtttgaacaagcgcctaagatctgcaagggagacctctgaaatgtacggaggagacaatcttctgtcgcgattgaaatcgaagcacacgatccaccgatgtattatgtaactccatgtcggtccatcactccacattccttccagaagtcatacgtgtaagcttccacgggttctggaaagcgaacgcgcccaacgtggcgactttgaattttcgttcccctgaactccaccaacacgagctctttgaagatacactccatccgacggagtaccccgtacaatgcatgtccatcttctatgccggatgaggatataactcctacatctactgcctaattgacgatagcctcttatctcccggacgctagcacgccatccgagaccggaatgtcaatcctgacccacggttctgtggtaaagaatgaccgtaccatgacgggtaaaatacacgataaggccgtgtgtcacggcattccctccttgcatcgaaggtcctcaactcttccaaggttggcgttcccgggctggcgtaaggttcccaggtctggcacgtcatctaaaccgtaattaaccgaatgtattgtatcaaatcatgtacatttaagttaacatggccctgccgatcattccaaacccggttctgagggagatcatctgtaactcacactggaatgtcacacaagctctgaactttgtctctcgatcattactagatgcatgctcggggctcgtggacgcgtatgtggaattcacagggatccggcaaggtacagatgaaagaaatagattggcttatttggtggaggcaaaagagcgacccgagcgaccgtggaataaggaataacgaataaatagcgaattcaatgccatgctcctctgctatatcgtacaatatcaaattcaactgcttaactatatccttaaccgaaataacctgactgcagccgaacctgcccagaccttctagaattctagaaaccccgtcgaagcactctagttccttcaatccactcgatcgccacatccgatattaattcattctctcagcccctgaacggactcaagttccacacccagtcacccgtagcatcagagttttctttgtagatccgggtatcgccactatcatgttctgtttgtccgagtctgcccacatagcaatatcgaatacaacatacgcattttatgcatgccaagccaggtgtaagtcaccgttgacatggagatcgttgcgacccacatcctattccttttttcccgacaatgttcggccgaaattatgggcgcataccgtgatactacggagtacggagtatggcacatcgtggtactgccgattcaaaccgagcgccaagactgggagagatctgtctatagatccactttttgtctttcactgagaacatggaggaatgtagtataaattatagcaagtacgcgagttgacatcaattgtgtcagatcagtctgcacgctctggataaggttgccgttgaatagctcaatgaagcttggttctacattaggatttgacaggtcgaaacatccatgtgtgcgtctgcatgcaggatatagaagtgttgagtttcatggattaaaccaattgggtaaagacgggtattacttgctattacttgccattgagttcatctcaggtccacactaatagggtatcattgagcttatggtcggatagcatactagtcaatattttgctttatgcaagggcacagaccgtttgaaaaaccgtcaaatggcatagaacatacaatagaacacctacagcgtgcagatatagtagtactcggtcctacattgtaatgcaatgcgaaaatcaaaaagcaaaaagcaaaagcgctggaccaacagcacgtcaaccccagtactaagtagcaccagcgacataacccagcacgccattattaccgcagccactcttcaaaaccaaccaaatcccaaacctaagcgcctagcaaagacagaccaagttagacccgactcggagcgggcctcctacgcctatatcgcagcgaaaccgcaagcccgtattgtattaagcagggactagcatacaagcgatgcacgcgagatccactcacaagaggagctcaaagccccaataatcgatcttttcttggccaagtacggaggacctaaacaggaaggaagcggatatccaccattcttccttcccccaatgttctgagagattaaggacaatacccccccacatcggtgcccacgtgattccgttacgcccttaccgtggccgcgctggccatgttcttaccttttggtttcccaaatgcgtctagaacaatggtcttgcgttagcgaggtggatcttggatttattttcttctcattgctatgtttatgttatgttatacgtatggggtgcatttccattctaatattagggcactactgtaggtgctgatggggaattattttgcagggagtgagacttttcctctttctgttctttcgtattcttcccttttttctcgtttgtgtatatatgaggtatttactccgattccttagggtaatagaggacagattgtggcatatatattccaatggcatatatctgcatatcttcaaggattatcaccggatattgtttgtatggggtaatgcctagacatggccgtttttcgtcactaaccagaaggcaggggtgttgtcgctattgactcgtgcataagctacattagtacctgcatgatccttgacgataatatctattgatcatccttggtgtcttgcctagtttgctatacccaaggatctgactattagtcgatagtaaccagttatttactcaccaagttacctttatatatttgcaattgtgtgatgcgattgtgtaacaattgatgcaatatccacggtgtacaaaatagtaaaagcgttgataagccaagctcgaactaaacacgggtcaagcaaggagagacataatcaagcaacacgccccggatctacccctgaaaccttcgacgctagcctgtaatatctctgtatggtgtgatgatgtgatgatgacaaaaaagtaccacggaccgttgagccagtcgcaaggaagaatgtcgcaaccaagaagattgccgatccgcacgggatgatctctccagaagagaagaaacacgcaaccctgttcagcagtggaccctttagctaactaaaatacaagggaaattgacccggccacccacagcagtcgatcagacggcagatgccgccgtgacctcatgtttccccactgtttcactgtaatcttgattttagccaaacaacataagttgtatgataatatagcactagattagcagaacgatcgagactctaggctcgtttcaggcccttggctagaaggtactcgcccccggcgctacgtgaaacctatgagacactctgatattgttagtgtcagggtaatttatcgttacgagggctcagactgtggggaatgcatgcgactaactcgttctagactggccttatcaccgtcggcgctaaatattggttttgctttttgggatggcttaagggttagttacgttgcttgtatgcactccggtctccggagtttacaaagtgcgtttcatactacgcgcctggtttggccaagacaccatgtgttagcccatttaagggtctatagttagattttgtggctatcgtcaaactccgtatagaatatcaggatggtgttatgggcaaggcgatcccgtacaaacattttcaatatcacacgcagggaccaatagccccaatacccatgtatattatagcataatgataacataattgaaaccctgataccataccacacacatatgtactccggatacgagagtacagagcccaaaagataaccccctgtcgataaaagcccaagcccaagctcaaactcaagctcagctccaaaccaataacagcaaacctcaccagcccagcacccaatccgcagcagaaccagcccatccccgcagaacccccctccgcctatccacgcacacccatggaccgcaaaaagcaaaaccgcaaaaaagaaaagaagacagactcctctagtttcggccacgccaagaccaaatcgccaagcggggaaggagataaatgcgggggaatacgccattagcacacaccctaagaataatgctaactaacgtcaactagttagttagttagttgactaaaaaaccccattacgcatcctgaggtaacatggcacaatatcgagtatacccactgctccgctctgactggctaccttgtccggggggattctgagctgctctgcacggcggaccgaaaacagtccagttcccgcctgagcggggttggtgtttgatctcattgctaggcgcgattgggtatggattgggatcggatcctgttggaccctgtcgatgcttctagatcttggctgggttgcgtggctggtgcatgtccgtattgcgggttgtcattggtgggctgggactgcgcctttaataacgacttctgggtttgctgtgtggtgatctttggtctgattggttctggctcatgtgtgtgagggagacgtgtgtgtccatggactggtgtgtgggcaaaggcttgcttattggatggtgcggcgtgccatgggtatactttaggttgggttgagggatgcgtacgagtttctgtttctgtgatactttccacatgatactttaaagttatgtctctgcagagtctggggatgatgatcaatgatcgacggttgttgacaacctgcaacgtacgttgtagtcgtacttcgtggtttggttggaatcatatgattatttgacacattcttgctaggctcaagatggagatgccggggattggggttgcttgcttgtcatttcccatgcacatgttctgcacggctgaatggggtaaacggctgtcgttgagacatactactttgagcatatggggagatgtcatatccccgctgtactccaccccggcgaagaaggttaccctgttgggtgatctacgtcatgccatgacatgccacggactggtgatccttgcattagcgtgtcaggtaaagctgcagaatggctacaacatacggggtagtgtggctgcacgcaatattcacatgttgtcagttggtatcagtcggaagcttgtgattgtcgatcgagtagagaagtggcgaaacgaagatgtgaacagaggaccaatagcattgaaaaggctgaatgtaaccgttggatgtacatagctactagaaggtacatacttccaatcagtcttaggctgtacctgattcgggtacagtgatatgttttctaaaactagcaagcaattgacaaggccttctaccttcactcccggctgttctggatgaatatatttatctaacccgcggtgtcaacatggtatgaccaagagggtagttagttgatttaacacacaaggctatctagtgtatgtccgtagaataatgataaactgatttcatttctataggcagtcctccaccaaaccaacaaatacaaagcaactattgagaccagaccaaagagataagaatgcaagctcctattacaagaattgtttatatacgtcgtacgaataaatggaaaagacttgtaagaacaaccaaatgaaaaaaaaagaagaatgctatcttaatgcctaccagtaacaaaaactcgcttctgaaacagagcaagaaaagagaaaaacaacaaaagacaattatagacatggacaatagatctttggaacaatcaaaagggcagagcagacggttgacaggaagagaaaaaggaaaaggggaaggggatatatgcaacatgctcttccagcttctgcacgcaataatgaagaccacgcagtggaaaggattttttccccccggatgcacaggatgagaggagataacaagaatgacaagaccatggtagacgggccggagaaaaagcacacagagagaaacgagagttgcctggtgtgcttgtccagtcgatgaacaggaatgagaccgagagataccagagacacgcccaagatcaatcgattcggattgttatctctcggaactcggttcatcctcagggcggattgtgtcattgagccatgccaattcttgtgcgggggttgaaaccattgatccaagttgtttgtctcccgagccagcgcaagaaacaaggtccgagggcggcacgccgcgagtcaatggcatcggaggatcaaccgatgagtacctgcccatttgaaagaccaatggttgatattaaacggtgcacgccggatatagtgacgagacaaggaagcgaaatcgaaaacaaaagacaaaactctcacaagttcgccgttccgagtcgtagcaccatgaaagagtgatgagacgtaacatcaatgagagaaaggttgttcctacccacagtcaaatgtataggctgaaggatcgaatgggacaaaaagagtatggccggaaggtgatttaggccgagaagcacatttcttgctcggcgaagcggcgctaaccacttgaacacaagacaagaaagagcgagaggtgaagtaaacaagaaaagaaaagaaaaaaaaagaaatcccatgcagaccttcttaggccattttctgacatgaagggcaggaagcaggtgaaagcgtggcgcggtacgtctaaatgcgccatcacttcatttggaattcaacctggatcctaagatgagctgggcgctcaagtgatgcagtacagctgaatcacctaccgcagcacagagccttcatcaacttctgcgagaaagtgggtgtcgattcaggggtacctggggcaccaaggggctgttggttactcagccccgggttccctggactcccgttgcgaccggagaggtgggcattggaattttgaaactgagcctgggttgacgcagctggagtcgatgattccacccccgcgctctggcgtttgggaggaatggcgccgccggcgcttggtcgctcgcgcgtctttccagctccaactttggctggagaaggaggcgggggctgcgcggcgtttaaacggtcggctgtcactcctggacgttggctgctgcggagctctctggcatgcgggtcgcgagcagtcgagctctggtgctggttatggagatgtgactggtttgggtaggacttatagtcccagccccgtccgttgttgagcttcatccagtcgtactcgccatcctccacctcgccggcgttcttgagagcttgtgtcaagatatcacgcagataatcgtagtcaggggtgtcctcgaaaccaaggttacggacgtagctgaggtacttgttgaattcttctgacagagtggttagtagatggttacgggtaatagtgataataacatacctggataaccatcgcagaggtccttgattgccgtcgtttgcttcttctcgccaatcttctcgtacttctgcttgttggtagcagccttcaggccctgccagggaaggccacccctcaagaaatacatgaagacatggccaagagcttccaagtcatcacgccgagattgctcacgccccagatgcgtgttgatactcatgtaacgagcagtgccagacaaggatttacgctcgcggtaaggaatgtgttgcttggtcttgggatcacggtattgcttagccataccgaaatcaaccacgtggataacattggcagccttcgttgatggccggccaataaggaagttgtctggtttgatgtctcggtagatgaggttcttctcgtgaattgtttgaacgcgcgaaagctagtgaaagttagtcacggttcatgtagttttgatcagggaaaacgcaccatctgcttggctaccatcacaacagtctttgtggtgaagcggcggttgcaatgatcgaagagatcctccagagaaggaccgagaagatcgataacgaggatgttgtgcagaccctcttgtccgaaatagtagacattgggaatgccagctgacatgaagttagaagaccgtacaccatcttattccttaggaatacttacggcatccaaccagaatcttatatgtccggtactcatcgcggagctggggagcatcgcttttccggggttcctaattgggtcagccaggaggctcgccggccaaggggaaagggtgcgatacgaatttgatggcgacctgctggttgttcaggaggttggtgccctcgaaaatgacaccaaaggagccttcaccgatcttcttgcccacacggtagtggacacccactacgtttgacgatgaggatgccatggtttcgggagtaagaattgtcacccgcgggaataaaactttggatcacggggaatggcttcagggacgtagacacgtgattgatactatgactgggcgcagttagcacaggaagtcgggtgatgaaagcaatatcaaggtttccagtcacatacatcagtaacctctattttttttttccgaccgaagcagctctaacaggctcaatggagtctattcgtcaaatagccgatgtaccggggacggcgatgaaaggagacagggcggcagacggaatgcacgatcgggacgagaccaaagggacggagggacgtctaaagccgaaatagcccaatacaagcggaattggcagtgctgagcagtaaatgaggcgttcgtgggtccttttttgacggtcggaagtgacgagctggggttgaagccgggagaggtggtagacaagccaaagaaaaggggaaaaaaggggaaaacaaaacacagagggcacttcgacctactgcgagtacggaccgcactgagcagtggtttcaaagatataccagaggacctgagaagggagaagatggagaagaagagaaagagaaggtgcaacactctaggagagagacagggagcggagggtattgggttcgtattggtaaaagacgccctggaggggaaggggggttagtcgcaggaaccgctggtcacgagaatacagtgactgtatggtaactttggggatgggaaaccttctctgagacctatcagaggtcgtcgtcttcattgttctctataactaactagcagttacatatagactcttattaaggcttacgcttgttcgaagaaagccaccaaattgcctaactcttgaatattcccatctcgtacctaccctctcccgagtctcggcgcttccgaagcggctcaatctccagggctgcattaaccaggcaccggaaataacagggaaattatatacatagtatcggctacgacatgcattttgtctcaagaaagaagttataaccggggcagcatagacaggccgattcaagttttctcatttcaggggagagctcccgtctggaggttaatcaggcggtaatattaccgtcttggcaggaacccggcctcccagttcgtcgatcactatgatctgtgtccacgtctctagccctagatatgacatgtccactagatagcccgataaaatcacaagttcatgcaatctaatgctagtatcgttacattatagcagataccgcgataaacggctccatattgattggactagtggtcttcgggaatgtcctcggcttcgctcccaagttcattctcaaccatgtcctcatcactgtcctggccggcatcttcatcgtcctcatcgtcctcatcatcttcactgctggacccgctgccttcactatcgtcactttcggggttgtagtcttcctcctcttcctcctcttggtcttcaagctcccgctgagctttctggagctcactttcatcttcaccggctgcctccgcggcgggggcgnnnnnnnnnnnnnnnnnnnnnnnnnnnnnnnnnnnnnnnnnnnnnnnnnnnnnnnnnnnnnnnnnnnnnnnnnnnnnnnnnnnnnnnnnnnnnnnnnnnnnnnnnnnnnnnnnnnnnnnnnnnnnnnnnnnnnnnnnnnnnnnnnncccggggggggccccgccgcatcctctccgccggctttattcacattgtagaccttggcgcgccgtgcctctgcgagactagcatcttggagaccatgtcgtttgatgtaagtatcgattccggagaaattatcctggtcaatcatcgagaactcgaattcctggacgtcttcctcggagccattctccgggcgagccatgacattgagattgaatgtccgctggaggacggatgtatacgaaacagagtcaacagttgcaaatgagaagaacaggagcggtttcttgaatgcaaataagataccggtagaaagaaggaagagatagcctggcgcaagccaaagtatgttagaattatcgagataaaactagaagcacaatggcttccagtcagatggaaatatgaatgcaacataccttctttactaccgcggaatgctttgacatggtatgctttctcgcccttccggtgcgcctcaggcatggcactgacaaactgtttatcatcagggcgcacaacacgggtgtgagccatgttctcatccaaaattttgcgaataaatgcctcggccgattcaccgggaccttggccaagctgcttcccatctcctgagaatgctgccttggctggtccatcggctatcgtaaacaccatagcttcggaggtcgctgttccctcgggcgggggtgtgattccatcggcgtactcggggatgatacaaaaattgaactgtttttgtgtcttctcgggcacaggaagacagagggcatgtcctaattcgtaacagatcatgttagcaactcaaaagttttcttgaccaagtaaactcaaactcacgaattttatccatagaaacaccgaattcaatctccttcgtagcttggttccttgcccgaagatactgatgtccagcagtgacctcgagcgtaagcttcttcctctgcggcgtagagaacgaaacatcttgaacataaaaaagaagtggcgcattgccatctttcaggttgactgacgcctgcgcagtctcccccgagtctccattttgaagctttcgctttttagcggcaggccccccccccgcccggnnnnnnnnnnnnnnnnnnnnnnnnnnnnnnnnnnnnnnnnnnnnnnnnnnnnnnnnnnnnnnnnnnnnnnnnnnnnnnnnnnnnnnnnnnnnnnnnnnnnnnnnnnnnnnnnnnnnnnnnnnnnnnnnnnnnnnnnnnnnnnnnnnnnnnnnnnnnnnnnnnnnnnnnnnnnnnnnnnnnnnnnnnnnnnnnnnnnnnnnnnnnnnnnnnnnnnnnnnnnnnnnnnnnnnnnnnnnnnnnnnnnnnnnnnnnnnnnnnnnnnnnnnnnnnnnnnnnnnnnnnnnnnnnnnnnnnnnnnnnnnnnnnnnnnnnnnnnnnnnnnnnnnnnnnnnnnnnnnnnnnnnnnnnnnnnnnnnnnnnnnnnnnnnnnnnnnnnnnnnnnnnnnnnnnnnnnnnnnnnnnnnnnnnnnnnnnnnnnnnnnnnnnnnnnnnnnnnnnnnnnnnnnnnnnnnnnnnnnnnnnnnnnnnnnnnnnnnnnnnnnnnnnnnnnnnnnnnnnnnnnnnnnnnnnnnngggcgggtgggggccgcgaagggagggtggtgttggtcctggccagcaggctggaagtatatttcgcaagatcttcgaacagaggtttatgctgcggtgttgtgcctaaacgagaaaacccattggcgacggtcagcaggaggtcgacgaggttatcgaagggggacgtgggtgcgttgttggctacgcaccgatcgcatcgtagactcgctttttcagcaagggttccgtcgcaaatgcctcctcgatggcggcgatgggcgcgcccgaagaattaatggaggcgaatgccatgtctctttgcgactgctttggttcaacagaacagcagtgcagggagatgcaggttagtcggagatttgggggatgaaagcaagggtggacccgaagtatccgcattgattggaaccctaacttggggatcatgtacggagtatggatatctccatactgtatgaattcaagacacaaatccgaattaacttcatcaagaaatagatatatgagtgaatgcaaagcttcatactagaatacagtggtgtgtgtacacaatgctacaggaaaaaaactccctccgccgacttccatctccttcgcccaatcaagcagcctgcttgggctttgacttctttgtctttgttggcttctggagacgtgcgttttggagatgcttgttaatgaagtcaatagcagccggtgtcaacgccccattcccgttggcatccaacttcgccttcctcgcttccgcaatttgagcaatcttcatgttcttgacatctgtctgcggtgtcatcatagagacggtttttctgtattccttgcgatagtcctccttcatcttctctctcaggtattccggatcgtgtcgagtgcggaatctggagtatttgttgcgcagctcatcaatgacggttgtaggcatgggcgggtgctccagtgtcggtatgaatgtgctggcttcaaccgccattcgcgttgtatccatgtcgccgtcggtgatgacaggctcttcctccaacggccaagggatttcgacgtccaagccggagatatagcgagtgaatcttgggagcttgctgtgttcgggtcgctcggtgtacggcccagcagcataagcgtgctgaacaatgacgttctgcatctttccagtctgtgtgtcttccagcggaatgacatgtcgaatgtcgtccatagacacgggaaaggactgtggttgggtatcacctgcttgtcccattctgtctttggcccattcgggaatgatcacgtcggcctgattgaaaaaacatcagtgagcatttgtttaatcaagaggtcattgacttgtatggctggtccgccggagacataacataccacgttgatacccttgatgaggacagtctcactctcccggttgacctgctgaatgacattgatctttccctgatcccgtcctcggataacgcagacccggtcaccttcggcgaagaggacatgtctccgttgttcgtgcttagggagacgcggtgggtgcaaaacggaggcatcctgaccaccatatgtggtacgttgtagaccagagtctcgcatgggggcaagaggccccttttcccaatcttcccagcggttctttcgtgcttcttggaattggccagacagcgcgccgccgaagtccttccgcgcccgccgaatcccaacacggtctaacaattcctgtcgttcatgagctttgtgagtttttttgagagcctgcttccgggccgtagctgtccgctggataactctctgcatattgggtgttgtggtccagcaatggccgaacgttgtctctgcctcaagaatccccaattcgcggatcgaaaattgagggtgtccgatgagccacgtgatcttgcagttaagggtaatgtgtattatgtcagcaaccggttggcagcctgaaacattcaagtagttataccgagaccagctgtcattgattctcacaatactttattattcttattgtattgctctatatttgagaaggaaaataccccatggaaagtgacaatgaaggctgcgaacgattgacaggcctcaacaacgccaacaaatacacgaaaaagccaatgtattcctacaagcagctttccgtaacagctgactaaattcgagggccacaacccacatggaaaccacaccgaggtggatggtatctaaagatattcgggcaatctcatgattgaaggtttatatccgaggattcggggattactgatggccattagacacatagagtcatccgtgctttggaccttctaattctccgtacacgtcctttcccagcatttagtttccgaatgccgtcagaggaacgcacttgtcttcttcggacaatcaagaagcaccggcataggttatgagatacgtatcgacgccgattcaatgtggttgagactattcttggacgtcgcttcattatgaagctctaagagaccctagaagagaaataccggcgcgacatcgtagccttaggtgtgatatcacgcaaaacttaagaagccaatgagatgccgaaggcgagcccgaagataaaaacaatgcctttccgattcttgttgggcgcaagacaagtcgggtcaaaaagtacataagcaccggccacggccccggggtatcaagatgttgtgatcaacgaagtggattgaaaggtccctttcatgagcagcatttgctcatgcataaggtctgggtgtgctcaactttgcctttagtccagatttgggttgggacgaggaaggaaggaaatctgtcacaacgtcggattgtatctgagatcgatcgtgaagtcccatacaacgcccattgaaattggcacacggatccatttttggcggcaaatgaaccaacactgataaatattctaaatatgtagcttctgtcggcacgctaaagcattctcatttacctcggaagaattatgctctcctatttttgggttcccgaaaaacaacttaacggcttgtggcttgtgggcgcaagctccaggatttggcccctgtctactatttttagcctgcgcaacacgatcattggagctggcaatatatcaactccactttcaaaacagcgtcaagaatgttgtaagccatgtaaactcagaagcaagcgaaggggcagaggtttgatggtgtggtggaatatcggaaattccatggtacaattaccccaatggtttgacgacacattcaattttgggacccccctggatgcagtagcaaatgaaacaaggtttgccagcagatagcataagatcgttggaaacctccacctacaacgtagtcagtacatgccgagagctcccggggagcagatcagcaccagaagcaactgagatgcagggaactatcggagcgatcttcactggccgagtcaagcatttggtactcctgtaggcctggaggcagccgtgtaggagcactgcccgtggaagtaaatcccggtagggtgatacattatatgtgagatccgaggacgtggagctaagaaattgccgtagtagcccttcatttttttatgcggtgtatgctgctgcatatctccataaatgtaggtttttaggagatgattgaacgaatggacaaagttgggttgcttctcaagctccgaggagaagacatgagccactgaagcagtacgagtgaaatttatacgccgtagtcaatacaccataagaggactgatatcacattttgctcatatcagataccataacagccacgggtggctgtgctgcctgtggttgtaagcaacaaagcgcgaccaagtgggccgcgtgatgtggacggttggacctcagccacacatatttatggctgtgtacctattaagttcgcttttctcttttctcaacctcggaaaaggggagagcccataagccacagcatataaaaaaaggcagcctgaaactcagggggtacacttgggtgtgtgttcatagagtgttggcatgatacatagtactatgtatgtgtatgtacatgtacgagtacgccgtaaaggcaacgtactcatgtaccaatgcagaccgatattaaaagccgtacaacgtatgaagtcccgaagcagtaccattaagatagtcatcggcgcaagttgatacctcatctagaccttgacacgaagcatctccagggggaaagccacaataccgatacaccaactggcaacaacaaataccgtatactgccaccgccccccgttgtctagcctggtcttctatctttctctcctccacctccaaatcatcattccatcgtcttttttccatcgcttcccatcggaaatacctcgtccatctttctaatttccctagagctattgctgctggcactagctgatttactgcattaaatctactactccgttgcgcctttgaacactgtatgggatcacccttttccttttcccccctcctcgggagcctggcttcgccctttcttctggatcgtctgttccctgtgacgccctcgtgcctgtagaaactcttgaatcttgaaaatctaggacttgcggggctccctactccctcctgcttatttgcccctatactgacttgttccttatcaagatggccgagatccgtcgcaagctcgtcatcgtcggcgatggtgcctgcggtaagacctgtctgctcatgtgagtactgaaagtggctctctcatcgaggtcgcttccctaaccctccgcgtttactctttcgttcggccgcctgactgaagttcgcagtgttttctccaagggcactttccccgaggtaagttccccccgattcccgaaagcatgttcctttctcctaggaatatactccggagaagcataattcatgaaggatcatctgactttgtttccgtcaggtgtacgtccccacagtcttcgagaactatgtcgccgatgtcgaggttgataacaagcacgtcgagctcgctctttgggatactgctggtcaggaagattatgatcgtctccgtcctctctcatatcccgattcacatgtcatcctgatctgtttcgctgtggactcgcccgattcgctcgacaacgtgcaggagaaggtgagtgtctcatctctgatcgatcgtatatcctggagcaaatttctgggtgcgaactggaccgaatatgctgacgcactacaatagtggatctctgaggttctgcacttctgccagggtctccctattatcctcgtcggctgtaagaaggatcttcgcgaggaccgcaagactattgacgagcttgccaagacctcccagcgccccgtttcgcaagagcaggtacgttttttcaacaccaccatgaatctattataaactaatataaaactacagggtgaggaagtccgcaagaagattggcgcctacaagtaccttgagtgctcggcccgcaccaatgagggtgtccgtgaagtcttcgaggctgccactcgtgctgctctcctgaaggccgtcaagggcaagggagggcgcaagcctggcaagggctgcctgattctctaaacgaactaattgttggtatgagagcctccacgaaaaacaattggtgacgttgttctcggaaaggaggagggcttcatggcctgcatgcgaaattgtggataatatcgaatccgggcacccgagtcgtggaggtttccccccacaattcagctggtcgaccttgtgtttttcttttgcctttatttgcagaatttgtctagggaggcgttgtcttcatcataaccctgtgggcttttctttttcttttcctctcgttccgacgccgtgaattttcaaatgccaaaccgccgcgttgaggtggcaactataaacctaccgaaaagcaccgaaaaaaagatcccagaattggaacaaccgggagatgaagaggggaagccattcagtgtagcaccggttgtgcaatttggtcaacgccgtgactcgccttccctggtcgagttcccctgtgtcatagattcttgtccctgcggttatctccccatacgcgaagagcttgattcggcttttactgttttctctccctcctttactacatttgtttttatgttacagcttatgcatggtactgtctatttccatctgatatgtgtaccttgtcatgcgtactgcgtactctgcgtagcgaagtgctccgtaaagctgtaaatctttcagtgcttccgaccactagagtattgcaacaatttcgagctatgttcgaatattgttgtttcgtttattttataagggcatattgatatacctaattctgcagacgcgtaaagaaaatccatctcgactaccgattcaaactaaggagaccctcaatataacgtctagcatccataccaagcccctcaaccagcttcgacggcgccatatccgcagcacgggaagaccctgtcaagccagcggaagaagatgcaccgcctagatcacggaagaagcgagcgccactgctgacacggccatgatttgccggggagatgtagtcgctcgctttgcggacgaggaaggcttcctgaggcggaggagcaatttccgcttgggactgacttgccgagaaggagtcatccttgttggctatgaatgagagggcggtggatgaagaattggtggataacgcggttggagtttggtttgtgctgtgtgggatgcggacccagacgacccaccatccgcggtgggttttgcttgtgcgttcaagctcttgcgggcgggaccgtgtgtctgtgtatgttgataggaggcagtgatggattgctaggctttcaatgcgggaccaaggtggcagggttgatgatggggaaggggatggagaacgggctggtgagttgggtggttgggtggaggaagaggtggagtctacgctggggatgttgggaatggaggagcggatggttaggttagatgggtcatagactaggtcgtagactggctgggtttgagtggagaaccgtttattggggtccggagagctctcggacatggcaattcgagaggctgccattgttggggatgttgatgataggagcggtttccgaagaggaccgagttggtgatgcatgcttgagtatagcgatggtgacgataatgctggtgtttcaggatcaaaaaggaatgtaaacataaatggttgatgctggagtggttatattagcaagctgatttgcatggaataaggagaaaataacataccacatatatcacgacctggagctttatcggagtagtatccgatccatctgccaggtggacatggagagtcctctgtactatcagagtcttcggcttgccgttctccgagtcgggctctgggcttccctcttctaactcatccaatttttctagatcatcacggggcccaagaacgaaatatcccgaaggaccgttcctcttgctgttccgatgttttacaccggcctggggtgattgtgtagcactaacgggctgacttttcgggtttgagatgtgtgaattggattcatcttgtactggagtaggactttcaggcggcgtagatgtcgaccttggagagaaactccaagaggagccatatccaagagtgaggtatttcatgaccgtctctgttggaaaccctatatattcgccgttttgctcggtgcgaagtggtgatgcctcgtttcttgttcctgcttgattctcctcaagtggttctgggagtggctgtggtgttgctattatgagcggacgaggtatacctggcttaaaattgtgatccggcgtggacggaggggcatcttccgaaatttgccttccacgttgctttcgtggtttacggcgacgcagcgaggttgggtcccgcccaactccatacgcagaatccccaaaccgataaatgcattccatccaatgtgatatttgcgccaatgagtgccgagaaagagcaccgacaccagtaaataccacaccgtcggatggtcgagggtcattatctgccccaagccatcgagtttggtcatttgaccccgcaggcccctcgaactgtggggatggatcaccaaacctggagacaaccaagtccaccaacccgtcgatccttgtgacgaagtcttcaagtacttctctttccccgctgccccactcttcctccccgacgccgatccccaactctcctcccgcagagagtttgatgccattatagatatcgacaattgggtttccggtcaacagaagttcccaattccacgcaaacttctcccagaaacgctcaagaaacagacagaatgtggaccttccgacttgatggaggatgtcgtccaatttgaagtcatggtgcaggaggaatgccgaatgggcgcgacgtaattgctggatcagtagatgtggcggccccatctctcgcgaggaataatgaaatgtgggggggtcggatgctccagaggatcgctgggctgtatcggtgcgagttcgggtcaggtcgatatgctagcttaacatgagcctttgtgatctgtgactttatctcaaccacttacagcaacaatccaccagttcttctccagctcaagcagaacgacccgcgctttgtccgtttcaacatattctagtgtctttccagctgagaagttactgtatattaagcacgattagattggttcatttgtgggggtttgcggggatgcctacctagcaaagttgaccatgccctgcgccagacctatctggcgcaaccgctcattctcttcatcttcgaggcatttttttgcttcgccttctgatgtggagccatcgatgcgccgtgcatggctcgatttagaagtatagaacacgatctggtccgctattgtctcgtcggtaggtccgagggacgggttatagatggcaaggtaggaaagttgggctggaatcaccaactgatgatcgctttcagacatcgcatcgttggatggcgttcacgggtcgtatgtaggtcgtaccagacaggcaacaacggtaatggctgaaagactgatccgaggtgggatctggatggatggatgttgatatcacgtgccttatcgataagctactatggaagcttcaactttctcccctgatggcttctcgacttttggcaattacccactagaatcatgtggattattccaggcccagggtgcctacatctctgcaaaagacccttggtccttcgagggcttgtctttaggtcatacgctaccaagacctccgatccgctccgcattctcttttgcggctctgatgaatttagtatcgcccacttgaaagctctccatgcttatcaattgaaacagccagagcggatttcctccattgatgtcgtttgtagaccgggaaagagggttgggagaggactgaagcaaattcgggaaggttagcttcactttacgcttccttgaatgaccgtgtatcctgattcaatttccctcagttccgctcaaagcggccgcctctgctctctcccttccaatccacgagattgatacattcactggatggacggtaataccaaaactcagcccaactgatattttcgctgaccgtggtagcccccaacctccccggacggtcatataaacttggtgattgctgtgtcattcgggctttttgttccgccgcgcatattgaatggtgccaagtatgggggcttgaatgtgcacccctcgttactaccgaagtatgtgattgctatatgttcagaatctccaaataagataattgacctgattgattagcttccgtggtgctgcaccgcttcatcatacccttatcgccggcgagaccaccactggcgttacggttcagaccttgcatccaaaacattttgatcacggagtgatattatcacagacaccggctcccgggttcgacatccccaatccagatttctgcaccgtccccgagttggtggatttcgttgcaccgaaaggagcacaaatgctcgtggaaagtattgaaaagggactattcgtccctcccatcgcagatgctttggctgaaaagtccggagatttgaaacacgcgccaaaaatcaccccagaggaccgacacatcaactgggcaaactggaccttggcagatatcaacagacgtaaccgagtgattggacctctctggagtaaggccctctgtgcaagcaatcctgcggatggacctctgtcattccaacagaaacgagtcatactcacgaatatcgaagaggttgacccgcctaaaggttctgattcgttctcaattctcccaggcctgccgtttacaaatgctcctcaccccgtcgagccaaggaaatcaaggcagctatatgtttttactgccgatggcaaggttctgcgcatcaaccgaatgaaagtggaaggcgaacaagatgcagagggtctgcgagccgctataaaagctcgcatgttcggtgatcgagcattccagtatgaaggccgggagttgactcccttccgcaactctcttgtataaatatgataaagttatgtgtactatcacctatatcttaaccaatacgattccgtttcctcatttcgatcagatcccaaagccggaatctagaaggattgtcagtttcgattctactcgctgaacttgagactcataccaatttgaactgcttgaccagttatagaagcattcttagccaatgtaacaaacatgtccgcgcagtcttctacctcgggctatagcgattcattagcacacatggtcctttcaagtcggcgagactataattgcttaccgctcgcttgagggttgtcgcatttgtccagccttcgatttgatcgggcgagaagcgttgaccctgggatgttctcagtattcatcgatcctagcattgagcatgtgctacttacccattcggtgagtaacaggccggggagaatagcattgacgcgaattttcgcgccttggctcttagcaagacacttcataagatggatagctaggcgatgcagagtcagtaatcaagcagcgtggtttgttggaatgatagcatacatgctgctttcgagacagcataaggcaagctgctgccacttggcataacgccctggaaagaacccgaaaatcagcattcgatgtttctatagcagtagacagtccaaggaaatttgacaagttttggtagcttactgcaatcgaggctgtgatgaggaagacacctccttccgggttcgcattgaacgtgggcaaagctgccttgaacaggtaaagactgctctttacattgaccgaccagcactgattcaatagtcagtcaaactaaagctcccactaccgagcatgcattcggtaccttgtcccagtcttcgtcgtccatggcatcaagatcgccgaaattggtcatttttgtccatcccttctcatgtattagcatttcgtaccataagagggattgattgtataactcacggcatttgagataataatatccaagccaccgagcttctcaatcgtggttttgacggcgttgatacagtcatctttgactccggcatcctgttttcaaatgcgagataatgtcagcgggtcaaatttagagaaacagcctatttacattggatttgagtgccttacgccttgaataaccactgtttttaccccatatttgctcgcaatgtccgaggcaagcttatctgcagtctctttgctggacatatagttgatagcaacgttgcttccctcagaggcgaacttctcagccgaaagagcacctagccctctgttaaaacgagattagtttattgatcagagcatattttcatgtttcaattgaagattcctaccgggagccaccggtgatcaaaacattgcgacccgacaaggaatagggcatgatgagtaggagtttatctttgagatcaagctcgattgctttgtttcaaagcgaagagacagatagacacaagattgagatacacaaaaggttggaggagttgccgaggaatattcgatgcggggtagagccgatcaggtacatttgacattttgatatttgacgatcaacaggcggagcttcggagaatcagaaagttatattgagctggatctttcagtgcagacagccacttacatagtgactatttccccggaattttcctcggtcgggatgttgcttttatataacacattgacgtccattatttgggatttctagatctgcattcaacagtccaagatcctatcttctatgatcatcgattatagacttcttacgctacagagtctagatcccacattgcctgtcaaccgattcatttttcacctaggtgcctgatgagaacgtcatttcttatgatatctgcaactatcagatcacgataattttaaaatagaccaagccggtgtaaatacacggcacttagatcacaagccatcctgcatattgggttctcttcatcccccaccaggcccgtcgtccggcctgggcaggccattggacaagaaaacggtcggccagaggcaacagcaagacaccagaggtactaagcgagctcacacgggcccacgattcgatgtaaatagtgcgtagctttggtgccaatgcgaacgaggagactgttcgcagacccagacacaaggcagcgcatttggccaaacatagaaagaaacgaatgagttttgcgcctgcgacaacgcagactgctgtagcgggaccgtttgtaagaatcaaatcagggtagagtgagttgtattcatttgggagcctttgatccgggtgaagtccccgaagaacattgagacaagcccagaaacatcgaagcgtggagaatggcgcggtgagataggattgatggacccgtcgggcacggggcactgtgacaatagtgtagttcttgttatgggtatggccctgagaattttgtacatgttgagcctcgaaatccttggctttgtctgcgctgaagttatctccggagctcacgaggtatgtccgatacgtgtagatttgagggtcgaaattcatgcgctcgagcatgtagagcatctcagctgtgtgcccaccacttccaagtacaaccaacaggtgggtaggagatcctcttgggcgacatttggagggaatgatattctgggaaatcgtgagcgagatgagtagaaactaggagagatagacaagttagattgattcaatggtacgagtaaataatacccacgagaagaatgctagccccaagtgcaattgccaggacaaaacaccaaaggagcaggccgccgaaggataaagaagcaagagagaaggacatcttggactgctgttgtatggcctcaagagattggtaagacagcccgaggattttaatgtagcattgtcataagaatgaagccgaagaacaatagaaagagaaagagaaacaacgccaactatggcaaaaggcagtcgagcgcaagtccgcaagtgtagatctttggataaattggagtcgcggtacatttatacacgtcccccgcacgtgcaagctccgacttgttttattttcctctttggcatccggaaatttctcccttgtttacaccaacgcttttacttgtgcttctttccacgttactatgtcatggcttctctattttctaagcgtttgacatgcttttattgcggacagcggtccgctcgctctcatcacgggcctgtttgcaatttccgctgtgaacattgtgaggctgacaacttctttgacgaggtaggctcattaagaaatcttttcactggaatatactcggactatgctaatgactgtttgccaaaaagaaaggagaaattacagacccaccagctgtggtcaccaacgcctacgcgcctggcgcatcagactcacccttcgaatcgactgacttcggtggatcacagttattttgcgccaaatgtactcggaatcagcatttatttaccagctccctagcttcctacttccccccctcggacgatcccaccgatagcgaatacgaacgcgggtatgagcagttccgcagaagcctagaggaccggtacccccaggtttgcgagtcttgcgaacccattgtgaaatcccgtatcagaagagctggctacgaagcgaaatcagatcatctcaggcgcatgatggatcaaagccgagcaaaccgagaatcacgacaggcgaggaaccggagctggagaagcttgcttcttcttgcgggcgcacttgcatattgggctagtattgctggtcagatagtgtggaacttgatcagtgtagctaccctctaccaaccctcgccaagtttcgattatttacccgagaccgaacgacctccaatggcacccaattctgtgatctcgtgcgtcaaccagtctatccgttcacagcgcattcccagtgaatgttcccctgatctagcaccaactgccggtctggcattgattgcaggtgcattttcactctggtggaatccgaagctgcgcatgaagatagacggaatgcccggtaaattccgcggtcttgcagagtactatcaagctcaactcatcgtcatggtggtacgatgtgttttctgggcagtagtcaaggatccgtctgccagtgggttagaacccaaactgattcctgccttccatgccttgatgatggttttcactattctagtaagtatatttttctccttgaactttccatgcgctaactatggtagtcggttttgttctctcgatatgttgtcagctactctagtcgtccactcgtcaattggtctgataatagctgggaaactcaattcgaaagtcctaaggcgtcttcatctgtactgcctgagtcacctatgtcgactcgtatcacaagatctggcggaacaccgaaggcaaacattggtggattccagcagcgcttcccaattgataaattggcccaggcccaggctcaatctccgtcacccgtcgagcagccgcttatggttgcccccaatctgacggataatgatggcatggactggtctccatctattacccataacctccgaccgaccgtgacacggcgagatcagccgtctgtgctcgatggtcctcatccattccaggggcagatcccagcagccccgatgcctcctgcgtggaagcttcgcacccagacttcaacaaagcctatcgaacaagtgattcaacctaatcccttccaccgcagtcctatccaaccgcaaggccaatggcagcaaaagcatgctgatgccgaaccagtgttcaaggaaccgaaatttttccctcctcatgatcatgatacatctactgggctggaaacgctgtttgaccgtgccttcaatctccagcccgatgctgcgcaaggacctggctggtcccagcaaccgcggaacaagggctcgcgtgtcgatgcgacacaaaatcagctcttttatgggtgtcttcgactaggtctgctagtcagcttcattagcgcatggactatctctcagaatcaccaggtcttgattccaggaaattacgtggagatcgctgcgctaggcgtggcaagccttgttgcgggattcgctttgatcacgatggtaaaaaggcctcttgcgcaatggaatggcatggagattctgatttctatcaccgaacttggtgtcgctgttcacatgggggcccatttgcccacagtttcgcttaatcgggactacttcgatcgctacggtaaactgctccttgttttcatggccgcacaggaatctatgaatgtattgtccttctacaataaggctaaatcagaaagccggcagcactcagagtctgtatcaccacagccacagccacaatcaccgcgtcagagtcaactgggtgcccttgactggtccgcaagtcaatcttcatccaagtctacacctgaacctcgagccagcagtccgcctgtgcaccgatcattcgagtcgcagctacccgttcctccactttcttttggcgataccgaggcggcctccagtttctcttcagcattaccttccgtgccgcagtatgggcttgccgcgtctcgaaatgtccactcgttcccacctaccaaccagagcgtcttcaataaaaacagaaacccacatagtttcactatggaatctttgaagcaaatcgagcctgtgtctgattatgagcgggactcggacaccgagactatcgccaccactacaaccaccgccacaaatttcaccaaccgcaacattcggtatgggaatgaccccggtctgggttcgagtgccttttattcaccccgacggaatggtcttggatcaggcatgggcggtttaagcttggatgatgatcccactccccgccgcatgactcgcagccagacccagcgtgggttacttggtcgccgtccgaccaactacgtccgatgatttctgtttcactttacttatccttccgttcttttttgtagtcaccgtttagcttcttcggtaccactggccattctatgtccctatcattgcttgcagactcgaactcgctacggcgttgatcgattgagctagtcggttgctctctttctttctctctttctgtttctactttcggtcttccggttttgattcaagcgaatctcatgggttcatagcgcaggcgaatgtttcttttagttcgatatcgacgggtttagctgcccttcaaggtgttgggaccgctgtacatatctttcgagagggttgaactaccccggtactttgatgatgtctatgaaattacgatgacagatgtgaatactctttgaaaaaatattgattttgaatttgatcccttacgttcgttcattgaagttccacatagacttaaactaatatccctactcattcaccctctcaacatgcaccttggatggcttgtccattccagcgccaatagaagctcgctctgcatcgacattcttatgctccagcagctgcgtgacgccaaagagctcatccatcttctcaagggacaaacctacaggcacaccatagtcagcaaaagacaccattatatactatcaaaggactcgactcacccttcgtctccggaataaagaaccacacaaagacacacatcgagaagcagaagcacgagaagataagatacgttctgtacggcccaaagtcagcaaacttacaatcgaaagcacaagccaaactcacccataaccattggcaccaacagtggccagcatattcggcacagccctggcaacaacaaagttgaacaaccactgcgtagcagccccaaaagaaacattcagtgagcgcagcctggcagtcgggatctcggagacgtaaatccagcagacgggcccccatccgaattggaaaaatgctgcgaacaggaaaatgcacaccagcgcaaaatacccggccgggatgacaggtacgccctcaactggcggcgcaatgcgcacgtacagtccaatgtacatcattgccaaaccctgcgcgatcgaggtccacaggagggagcggcgtcggcctagcgagtctgccacgaatattaggaacacgccgcagctgatcatctttacgatgccgtagacgccggttgcgaagaggttggttgcgttaccggttacgccgagctgtagaggttagcatctgattgtattctcgggtttagggcttaaagataaaagtacgggctcacgttttgaactgcgactgttagctcaagaatatctcaacagtttattgggatagtagcaacatacaaatttggggagcatagtagttaatggcattagttccagtcatctgctggcaaatcatcaagacgatagagataatcgcgcgcttgcgattacccggaatgagccacatctctttcatcaagtcccagaagccggacccagcgacaagtgcgcgctcctgttctagctgggtggcaatggccgcgaactcctcttccacgtacgggtggttggagggaagattgcgcacttgggagagagtcgcacgggcttcttcccaccgatcttgtttggccaaccagcggggggactcgttgcacaacaacataccgaagaatagaagtattgcggggagaccttgcattgccagtggaacgaggtacattgcggggccctcgatattgagcagcgagccgtaattgatccagaatgcaagcatgatgcccattgtaatgaagagctggtatagacctgttagaccaccgcggattgcgcgcggtgcattctcggagacatagagtgggttgatcatggatgcggcaccgactccgaagccagtgattagtctagaggtgtggttattaacttgagataatgggtggaggactgggggcggaaatatttgtcttaccgtccgatgtacatgacttcgatgtggccgctggctgctgtttgcatgacaattccgagtatagccaccaccgctgcgccgattagggccattcgtctaccccatttctcggctaccggggaggcaaccagagccccaaagaaacaacctgcttggagcgtggatactatattggccgatagatttgctgccgcaactttggagatgttctcgaggccgtatgtcctgcagcaagacactggtcaacatagctagacactagcagtctattgagcagagataacacacttcttgaatcctggcatagttagaactccgccaataataccggagtccatgccaaaaagcattccgccgaaacaggcctgggaagcattagctctataatcctagaattattgtcattgcgatcgctaaggagagactgaccgaacatgcaagcataaagaccctccacccatagatctctttagggtcttctttcatcgcctcattgtgaacaatcttttttagaaaccatgacatcttggatagaagcaaaaggaggcaagtcaagatgatcgcagtgaatccgaggggagtagctagcttaaaagtaattctctgagactagctcatgacaaagctaaactttagatgccgtcgacttttgatatgcatataaaagaagagaagagactatgaccacaagcctatgggaggtgtaattctaagcccagttgtcttggccggccaccgagcggcctacggaacaaaagcagccccccgaaataaggcgagcagacatgaatgaaaacttccacgaatccgaagcctggcacgggctgcagaaagctactacagctcacatggctagggtgtttgggggttgatccgaacatgattcacgtgctttcagataggagtgcagttccagggtagtactttgtatgtgctgatttatcggcgatattccgagcctgaaaaattacaggaggatagatagctttagccgagaaagagagaggagaaacttcgaaggcttgaagttgtcggctgttgatcttaccccggactgcggggaaactcaaaatttaaggctaatcccaatgcggcaaaacaatccagaataggatgagaccttgaaaccagaaaccagactgattcattgcacgatatcagattgtaatgtctgataggaatcaacttccttctgcactttccatcctcttccgtaaccactcaggaataactggcttcttctcccaagctgccttccaatcacgttgacggtctggcacagcataaacagctgagacgaaccagcaatcctggccagctgccaagcccactgcaagtgacggcaaaagcgtacgtccgtgaatgatattagagttgggatcagccaagacgatccgaccaacgcgcccaatagccgaatggagctcggcgatgccaacagccccagccgacgaaaccacaagtccactccggctgtcatgaatcgtaccctctgagtcattttcagtcataggtcccaaggtacgaccattatcgctgcgacatccgtaaatagcaaaggcaccttcggaggtctgcagagcgcgaccggtgcgcacatgatgagcgcgcagatgccaattctcggtttccgccgttggtggaattagtatagtctctatatcaacatctggccacggtttccaaccagaaacaagaattggctgaccattgggctcgggttcctcgaaacgcgcatcaagcgctagccgtctagtctgccaaatatcgccgccgtcgtctgataaggcaagcatgctgtctggggcgtgctgttctagctggtagccacccgttggaaccgagtatccaaaggcagaactgtacgcaaacttgccatacttggcctgtgtcgctttgagggggtagtggcatgcttgaccagatgataacaggaacgagtgtcccccacgacggatggcaatatgtttggggtattttagggcgaccacttcaggcaaagaggaatttgggtagggctcctcttgcgcggaccagaaggggtgtgtctcaggtagtgccagtggagtgaacgagagacagcaccagtacggtgacccgggagaattgtaattctccgttaggtacatgttagcataagagtagccgagactcaaagtgccatcattgtgaaaaatgtcatcctgcgtagaccaccaccggaagtggcgaagtatgattccccttaccacgccccatgtcaatggttccggtagttcgacatccgcgaagcctaatgcaccccaaaatccaaccatggcaaatcgataggtcatagagcgtccgaacgggatggcactgcctatttgcttgtacgtctagtcaggacaaagtcgcatctcagaagaagggatcagaaagacctgcccaagacgtaccgttaggatcgaagtagtgcacaaaatctgtagcatactcccgtgcccgctgacgatagcgttcagcacgctcaggatcgaagtcacccgccagcttggaataaagaagctgcaagaactgaatggcgaatgagcccgagtagtagtccatctgatgatgactcttaggtccatcgttgctccatccccctccaacatggaaggtatccaaatggtccatatcagcctcaatgcgagacgaagagtattcggcgccattttttctgaggcccaagtttgcaaagacgcggaaccatagcctacagccgtcccaaccgtaattagccgacttattcagtccacaccaaggaaagaccctactgggcaaatcgagacataacataccagttcgtatttggcatctcgcgcgcattaatactcgccaaccatctaccaacattccccctctgcttcgccgtcaatggatcccaaaagacatgaggcgcaacagcaagcgcaaacccaatcggacacatctccaccatgcgctgatccatatcctcgatatggccccagaactccgggtgttcgggatcagtcccgttgatgattccctggcgccagcgctcggcctcgccgtattcatatccgccgcccaacagcgaggccaggccccatagcggacgtgcgtatccctcgatctgggcgccgccttcgtcgaatcgtgtcgtcgatgtgcctactttgacgcgtgtacctcctggtgtaaagaggggtactagcgggttgagaatggcgcgacatgcttcttgtaggtcggatctagtgcggaagggggatttgctgaaggcctgtgagggggttcggccgttagcgtggatagacatcgtaagtctgtaggcctggaggctgtggggaatttgtgttgttatggtagctattattcgtttgatatgttattataggttttatagagattgacatcgggttaatcgccgattattagctgcttaatagatacttcatatcggggttcgggtgaatatgccgacatatagtaacaccctggacctgaggccatcttggtacaaatcggaattcgctgagaatgccgatccagccagttggatctgtgcgtagttttgaaggatcctggggttagcggggggtttggattcagccggtcgacgtaatgtgtggagatcatcagtaataagaggccagtttgttcgaaataggctgatgagaatctgataagcgggggaactatcgtccaccaataaggaaacaggctaagcaaccaatagtgtggctcttgtcatataggaggatatcacatggtattattgtttgtacatagggctcaacagcactcaatatctatacacgtctcaaattgcatgacaacaatgcaattggacatctaaccacccaataggccccccaagaatcggcccagctctttcacaagagcatcatcgactccctcggtctcaccaagaccctgttttaggatctcggtccaccgggccagggtaatctcgtgcagtttctgtccgttcaatgcggaatggacacggctggcttgatcggatgcgatggagtcgtcagatgagacagatatgtggctttcgacaatagcgccatgctgcagacggaggaatgcacgagtactaaagggaagtgaggagggaagtggcgggcgttcacgaggatcttcctcgatcgggtatgttgagaaagtgaaccgcggtgtttgtgtgtacttccactccaacgaccgcaactcggcaattcctttcccaatggtaggcacttgctccccttgtacatctcccactgtaccagcaacccaagagtccccagcgaagacttcaggttcattggcatgagcacgccgtgccctgagaacagcatccggatgtacctcgtagagccgagcaaactgctcgatcacaccctgaaccacgccctgcatcgaagagaacgagtcggccaacgcagacgagacattcccgactggagaacgaacgctttcaacacccttagcctggatatacgggcgggcggatgatcgcaggtaccggccaagatcatgaatgttcggggaatcgagcaagcaagtgccatgatggagggctcggtgtcgagtaagcttaaacgcagatccagagatcttgcgtgtcagaggctcgttgggatcattttccaatccctctgctcgggccatgacaatatcatgccgttcattgacactagtgttggtagccccgacctgatgaagtgcgcgcaccaccatctcggcatgcttgtcgcgcgtaaacgaggtccgcgggcatataacgctgtaattcaggttgccttcatcgtgaaatacagccccgccacctgatcgccgacgcacaaatactgcagcttcgtcttctccggtcgtgccgttccggtcattatgaagtgctcggagatctgtctcaagccatgggttctggttgcgaccaatgactacacatggtcgattggcatatagaaataaaaccgtggactctgtcggggcgttttctagtaggaagtgctcgatcgaaaggttcacgtagggatctgttgatagcgattggtagatctggtgtaaagaggaagggcggctggcgagctcggcgaattggtgagcgggatatgacgaattatggcggatccagccatattttagcggattagtccaaggtgccgaagacgaggaacatcctcggagggcgagcattggggcaaagtggaagaggttatgagcgcatcacgaaagttatgggccgatagtcggttgcgctagtcccagataggaatctcagcgatgagtcgaattcaatttcctttttttctacttgcggtcagccatcaccactgttcttctttcttattctgcagtttttattgatctcaaggtctttgaacgtgtaaattatcttcaatcccttgcgactatctttgaacgcccatcatgtcgacgtggggtcaatatttccgtgtcaccacgtaggttacccacccctcacaaaacacattgttactgacacccacaattcagttatggcgagtcgcactgtcgctctgtcggctgcatcgtcgatggatgtcctccgggattggaactcaccgaggccgacattcagccccaaatgacccggcgccgtcctggccaaagcgctctcactaccccgcgggatgagaaggaccgagtcgagatccagtcaggcacagagttcggtatcactcttggtacaccaattgccatggtcgtccgcaatgaggaccagcgccccaaggactacggcggcagcacaatggacctgtaccctcgccctagccatgccgacttcacctaccttgagaagtacggcgtcaaggccagcagcggtggtggtcgcagcagtgcccgtgagaccattggtacgtcatgtgtaactatcaacgccagaagcgattactcttgctaatccaattcccacaggccgtgtcgctgccggcgccatcgccgagaaattcctcagcctggcccataacatcgagatcgtcgccttcgtatcctccgtcggcaacgagcacctcttccccccaacccccgagcacccctccccctccacgaacccagagttccttaagctgattgagacgattgaccgcaaaaccgtcgacaccttctcgcccatccgatgcccggaaaccgaggctgctgcgcgcatgaccaaagtcatcgagaagttccgcgacaaccacgacagcatcggtggaaccgtaacatgcgtgatccgcaacgtgcctgtgggactaggtgagccctgcttcgataagcttgaagccaagctcggccacgcgatgctcagcatccccgcaaccaagggcttcgagatcggctccggcttcggtggctgcgaggtccccggctcaatccacaacgaccccttcgtcgtcaacacgtctgaaaccggcagccctcgcctcaccaccaagactaacaactctggcggtatccagggtggtatctccaacggcgcgtccatctacttccgcgtcgcgttcaagcccgctgctactatcggccaggcgcagaccactacttcttacagcggtgaagagggtgtcctggaggcgaagggtcgtcatgatccttgtgttaccccccgtgctgtccctattgtcgaggctatgtcgtcgctggttatcatggacgcactcatggctcagtatgcccgcgagggcgccaagaacttgcttccccagaaggctcagactattcgtactagtcctactaccgcgcccaatggtgctccttcgttgtagacgggaggaaacctgacaatttattaaaatgttatacgcaagcgtcattaagaagggtcacgtctatgtctatatacgtatttgatgtatcatggagctacaaaagtgttatatagatgccatattcatacatttaccaatttcgggaaaatctacaaaattgtctaaactatagttattactcttaaagcctcaagaagcctcaaagcaagacatcaattttgaatttgccacctaatctaacaagcgctcactcggaaccgaagaatcacgaaaaaaagggaacacatggattcatcagaaaaatcattcttatctcagaacggcatcaaaacatcgctgtggatatcgaaacgacagaaaacagcagccacccacggaaagcagtgtgacaaaagtaaagactccaagcgagaaaaccacaaacgcacgctaaagttgtgtacaaacgacacaatgcaatgtaacacagcacacctctaggtgtctctcatagatgcagacaccaaaccaagctcacctaaccaaaaaaaaggacacaaaacaacaagtgagaagataaaaccaaaaaaagagaacaagaaaatcaggagaagaggaaagatgccagatctcagatctaggtactaactctccggttccctgtgctccaactaacagagcgctcagacatactatcaacatcgccagcagtagcattaacgacacgaagtttctctcgaggaaccgtgaaagttatctggactcgtcggccctcagcggcaccctctaggtcccaatcatgtacatcttcctcatcatcgccgaagccagcttcgttgcccagatatcctggcgcgccgatgaaaagatcatcgcgtgtagaccgagcagtgttaaacacatcgtctgagactcgtttacccgcattccagtctttggcgccctgcttacggcggaataactctgctgaagcgctgactgctcggcgcggggagctagggcccgagcatgtggattgttggtcagacccgagtagcgtgctgcggcggtcaatgccggaggcccggtgcgctgtgctagtggtactagcaccggagtctagctggctgtcggggctgcggcgggtcattgtcagggctcggcgcatggtgttaattacccagtcggcaggtttaggttttgattctcggggcagttttgaaggggatgagggtggtgagggtgatgagggtgtggtggggtcgaaggcatcaaagaggagggactcgttctccgactggcgatgggacatgtttgtcctggctgtagagtaggaatccgccgaaacagagttttccgagggggctacgccgtctggatcgctgtgtactgagcctgcggcgaggtattccagtgactggtgtccactgccccagctcagaggtcgatcgacaaggatagctcgtgcttgattgaccttgcctacaggttgggtggatgcaaaggagaatgtcgaggtttctgacagattggtggctgtttgttcgctttttgtcggggacacgggatccacagatccaatatcctttcgccggctgtagaaaggacctaggccaacgccgaagatggtgctccgaggagttgcgtagggggtgtctgagaagggatcttcgggctccgtcgtcttgaccgtgggtcttgtttcagctggagtgcttgccatgagatgttctcgtaggatctcttcatcttcctcgcgttcatcaatagggtggatatcaccagtagcatcactccaccggtattcgctgtttcgatatgagaatggcctattgctcactggaggtatcatgggggatcggttatttttggctagactgggagggtccaccaacagcccagtcctctccgccatgccttcgccctggactttccagttgggttgtgtcgtctggcagcggtttgccgaccaaggatacacgagggcatcccttgtttggctcattcctgagccccgaatactgcttgcttgtgttggacaatctcgaccccaaaagtgagatcgttcggcccccaaagcaagttcccgtagctgcgagtctcgctggctctttccacggcgctttcggtgatagttccatccacataaaacaatggctatagcaacagggcatccaatgcccagtccaacccccaagccggccttttgggacgatgaaagcttaccagaatgggggaaagcattcgaggaactggctgcagggttgctgtaagaagtaacccaactgctcgaagtcacattgtagagatagatctgcgggttggactgtgtagtcggtaatgcccgtttcgaagacgatttcgggatagtgtagcccccagaaatcatcatcacacccccagggagcattgccgctccatgtccgaagatgccagtaccctcggtgattcctaagccttcggaagagggtgctgtccaaatccattcagtggttccaccaaacccttccgcaagatccagaactgcaaactgcggctcagcagggacagtaatatcgcccacccaacctccaaacacaaacactttatttccatcttctgagagaactgctgtgtgaccggaacgaggctcgatagaaaccgtatcccgaacagtcagctcagtctttggcgtcaaattcgagaccgcagaaacaaagctccagctttgctgcggcagcgagaaaatggcgagttgcgacatgttgaggaacgcctgcctagtatgaccaccaataaacaagaaatcctgttgtttccccgtagaaccggcagcatatgtaggctgaagcggcacgacggccattccggcttcagcgatgggcggtgcgcgcttgccagtagtggcagcggtgaacttggtgttgtagtagggactcggccctaacacgaccgtcgagtgcgaatagttggctgcggagacccatgtttcgtccgtgctgttggcgaatggacacatcccaccaaaagcgtacatggagctctcgtcctcgttccgggatgccgaatacgtaaaccccgccgccagatagttcggagcggtttttgcgtcgctggtgataactggtagtttttgccaagtcccattgccgactgggctattgctgtttgggtggaactcccatagtatcggcttatcggatgcgctgtggcagttgcccgagtagactgtgatgaacccttggtcattgatggtggaaatgaaactcgagttctggtcagaactgtagaacggcgtgctcttcagcaaagtttgataggataaattctcggcgtcgatactgctggacaggttgagggagacgaactcggttccgccggtggagctaggtcggaggatgtacgcgagggagtcattgtgttgtggggaaaggaagatagaggacggagtgtatgggattgcagtagagggaccaccgagtgcaagaagcgcaagcagtccctttgccttccgatgcttcatgctgcttgcgatccgagacaatcagaagcagggatacattccaagatcggcgagcatgacatgccacgcgaagaagagtgtctatttttggacagtgcaatgcagatattaaatttgacaggtgtcaacgtggtcaacgtgaacggtaatgaaaaggtagaaaggtaaggagatattggaggggtaacattgtcttcagtaaacaagtttatcatcagacctgggtctcgcctgttctctatattagaccaatcatcaatcacccaagagtaccaagagtcacattcatttactcggctttgtttgcttgcactaaacaaggaaagagggaacctaaagtgttgccgcgagtcagatcgacggattgacttcgttgctgggcaacggcgaggtgattgcgtgtttcctcatgttttcaggtaaactcaagagcatctcctacatatgcagctatgcacaccaggcagtagcattaaatgtaatctaattaacttggcttgatttttctcaatattagaatccttcgacgttattcaaatctccaagtggcctttagtaaagccggtatatgtttcagactacatcaattcaatcgatctattaccagatacggggtttcgcaccttttaccttttacattttaaggtcgttcatcacggaacatcccgaggctatgtacgatctacacatgtatgcttaagttgtatgtagacatgcatattgccaagattaggagcggagcgcgctaaatccttgcctattcccattctagaaaaggatgggcaacaggaagagagctagaagattcttggaagaaatagcttgagacgttctagatatgatatatttcttgggcatggagactaaacatgaattaaatgtgaaaactcgctcaaaagttaagtaagaagccccaatttcaccattgaagcggttataaacgaatgtataagtggaatagacatgtcttcctcgtaatccttaacgtttcaagttgatttcatttctttttaccgcatagctaaagggtagctgagactagcaacttgcaagccgcagcgaattcctgcgatgataaaatcaccttattcctcaggctggtcaagatgatggacagcatgacctcctttccggcctgcttctttggctctctcgcttcctggctcgaattttccacgcgaagcatgaccgcctttcgaggcaatgttcctcttcagagtcgtcagtttgctgtatatggaataagacactgcttttactaacctgcttctccttatccatatgggcaaatccgccgtggtggctagactgtccaccctttcgagcaatctgctcgacctcttcgtgaggacggttgtggaaattaccggggttggggttgtcgaccattgtgaatatgtacaatatgtacagagtagtattatgattgtaaatagtttggaatgttgaaatgcgtgatccgatgccaaattagctacgtatttatacacaactccatatatgtaacgccacggggtggctgttgacagatgcgatggagtcactttgacgtctattcagccccgacttttctatatttgcctccactgagaacttgccatggcctcacaacgatccattcaggggagttttaaggaatattatcaacatcatcagaggagaatgtcaatgccaatttctattacatcgtgttatgggcccaagagcaagccatagcttcgtgttgaagaaaaccgcatcactatcttgtagatatgtttagttctcgaagagttcgaagatcgaagttctatagtaaacaatcctatatatccttagacaacaagataagcacatatgattacatattccatataattaggacctgagtcaaaagctcaatatgtccaaacccatggtagataaacacatggcatatgacctcaaacatagatagtggcaaccttgatgaacttcgggggacatcgtgtgattgcctagactcaaagcctaatgttgtctacgtcgatattcgtcacgtcgccgtaattgtgtcttttgacccaattcgtggatccccgcctcaatccaaactaatacaccaaccttaacatataacttatacgataatgaaaaccaattaacagcatttcatatacaatgtccgggaaagaggtccattgaacgtatacagccggcaaggctcatactagcgaatttatttcgtagagggattaggcatccccgaagtatcaggccacttacggaagaggtccgccagatgatccatcggcgccgttagaagccccacaactgtctcgtacggaggcctgtctggtgcgctaggatgagaacgcgaagggacgaacatcttcgttcgtccaaagctcttagaaaggccctcactctcctcttgagacaatgcgtcctccagtttaggcaaatcttcagtctcctcctctttgatatgttcagcaaggtcctccatcagctccctgacagcaggaacaaactgcgtatttgaaggtgtcatgttttggaacgccttcaattgcgttttaaccttgacccatcacgtcacatcagcactctgataggtaggtggcagaggagcttaacttactttctgatgctggtcacggtccttattggccatttccatgccaccggggagaagtttctcgaagagagggtaaacaacaagctcttctccaatggagtgtcgagctagttcccaggtgaacagattctggaaacgagtttgttcatcctcgtccttggaggtgattatcttgccatagtacgattcaatatcccggtgatcttttttgatcgtgtcgatgatacggggtgtcatggtagtaggagttgcaatcccacgtctctgggcaagacgtgataggagttgactgaaagtaggggttcttggtgcacaaagagcaaaagtcattgtggccttggaaggggagattcacgacagcaatctcaagttctcgacaagctggaacgtggactccttataccagatgtaaatttaggcacaggcaaatacagtgcaagtcttcatttgtctatctgcccgctagatcatactgacgtgaagtaaatgcatgtagtatagtaatggaagatatggtatttgctgcgatcctattcaagcctagacaaacccgaaagtggtaaattgatcttacgtctaatgggtgtcatgagtgtcatgtcacatttatataatcctcaaagctcacctgtgtacctaggcgcatgatcttggatatttatgatatcacatgtgattcgggcagtttctttgcgggaaaactatccgtcatctttgaatcatcaatgggctcttgtacgcaggtgcgaataagcgcctcgcagttagtgctttagactgaaaggaaagttttccgtcatccgcaccgtggtcatgtacccaatcaggaccatgtttcacagtgtacggtgctctgatccttttacaaaccacactacagttaactgttggcatggtagtttatgtctagttcgtctatattctgcctgttgggacaagttagcgttcagcttctagcaataggtactcacgagttgacatattcctagcagccctaagcaccctcttcaaccagcgatatccaaattgggcaagtcgcagctgcggcctaaaatccggtgcatacagctatatatgtagtgtcttcatgtgaaaaagaagcaaagtctcggaccgcaacaccccaacacggttctgtggattccccggcttacatccaatgttagcataacaaccgagctaacatttgactttcttgtatagctagttcgcatatgtgaaaatgggttgtctggatagtcttattgagagaactagaaaaggagtagacacatgtctaactatgaacagaatgtccattataagcgtggagtatgtcctgcaatcccaatggagctagcggtgtaaataactatctcgcttattaaaggcaactatacgagacccatgcatggaagaatgctcgagcggcggctaccatcgtcagccaccggcgttcggggacgttggtctcatggctacgagaagcgaaggggaaagcaagtatcggtggaaaaactagtcggcttcagccagtcgatctttacggataaatgagattggacaggtagttcatccatgctcggcaacaagaggcaaatattcgatactgcacattgccttgatgtggactataaatggggttccaagacaaagtcgccacctgtggacttgtatacaatcacatgtggaatgcaagaggctagaggtatcgacaaggttattctaatttatgatcaagtactaaacacctttgatgctcaccccaaatcaaaaccattacgggatagagatcaacagaggatgacaatctaaatcaaaccatattgcaccgtgcctgtgcataaacaccgtgcaatatagcgctagcccaccggtgtctaatttccggtgctccgctctgttaaattgtaaatccgactcgacgttaacacagagtaataaggcaccagggtgtgcacacgcccagtcgactgggactcaatcagagagggagaacaaaaagccaccttgcccctttcgtcacacagcaggatcaacacgagcaatttccctcaataagcatcagcgaagcccgaaatggatgagggatatagaattgggaatagtgttgtgcttcccgtgagctttggccatgctcgtcttcgtgtgctttgatcgcttttgcggtgtaggtggcgctcggggactgtgggtgctgtaggtacatgcatcgtggagaaagcagagtgatgttttgaacctggatgtggaatggcatgaaatgaagacgggatatgcagaataaagattattattttgttgaaacggtcaaggtgtcgccaaccacccggacaattgcctcacactccaacctctaggtcctttctaggattagcttggtttggaatcgcatgcatcggcgccggaaatggctgcagaacgtgttgtctcggatattcaggccgaacttccattgcgcggggcaaactgtacaaccatggtaggaatgattggtaattcttgcacgctctacccctgtgctataggatgacgagtatcgctcagaatgcggaatataacgattgatcagccttcttcccgctctacatgcgacagcgagggcatctgccccaatccactcggctacatctcctgagaaacgggctcatatactagttcgagggaataggtagactattgaaccccgcgattatatgtctaccgtagtttagccctcgatcgagtgatcccccgcatcgtaagttgtggggcatagcgtcttatctggagtctggtccctgggcatctctggttccccggagagttctaatggcatgtcatgaccttggaatgcagataatgtaagtcggcaaattaccgatcgtacttcagggttacacgcaagaaaataaatcaaggacataggccaagacgatacaagagaaagaaggctaattaggggccagacccctatatgacgtcgagtatacggagtcgcgcacagataattttatgcacggacagcggatttcatgaggatttcctcccggaaagagcttcatgcaggacgcctcccggagcctgggagtattctgtagtatcatagtaatatatagtgttacagtatactatatggcatataagcttataacatccctataacatgccatatatatgtacaacaagtcggagtgtacaaagtacatccaagaaagagtagagttccatccatggatacacttttgccttttcttcaattgactgggacgacataaaacggcaaaagacgtccttgatacaaccccttataatacagcttccggtattagggcccagcagttcgggcagaagttatgagcgaatctacgattggaggtaaaatgatctatagccagcaccggagtaagatagtctgtctgtaaagatgcaggcctcggagccgagggagtcgagttggaataataaaaataaggatcatcacacggttgggcgaccatggtcggtcatttacctacttggcattctcacgatggcttccagtctaggctctttgcctacatactcgctgaaaactgtcatggtccatgggaattaggctgtccacggaagagtcctcgacgtaaggacccaagcccagtggcaaatccgccactgggaacaactacatttacaggatataatctgtatattctatattctatattctgtctataagatatgtattatagatgcacggaatagtaggagtaccagattaatctgcaaacagcgcggaattccagagctgatagccccactagatatggctaaatcctgaaatctgatatattcaatccccccaagtagatcaattggcagttcgagcgtatccctttttcctttttcacacttattttttataatccgccattcggttcaccattgacttggtaaacttatcttgtttcttggcatcccgatcatcgctctaccctattacccaacctcccccttcaactcttcaactctcccctcgactctcggtctctctacacatctttttctcttctctttctttttttgtaattcttacagctgcttggctgtcttgcctttcctttccacattactttcggatctcttattcttgattgattccgatctcgctccccccacctccacatcccccgagaactggccatccgaatgagccaaaccccgaattatttatagcatctgttgtcaacggcactccttttttttgactcatttccccacgtgtggatgtgggatcgtccataccctcgtgcagtagcaggtctacctcgtgtccttcccccctaaggcgacaacccgctgtccggtacacggtttccgttgccttgtcgccatccctatcgacttcacgaaagtaatgccgacctgtttgtgcgtgcaaacagagctttttgtcagctcaccttgaatcaattattcacgagggaaacccccgcaaaaaaaaaaaagagtcgaattggagaatgttcaattaggatgcacaactgcactcggcacagctgcctcagccccctccctttgaaataataccacacaggaaggaagaagggaatatgacagaaaatagatcctcgcaagctggtctggaggatccagatcagctggctcggaatcatgtctcaaaaaatcacaagcgagatctcagccggtccgacgagtcatcgcaactcccatctgcgtcgaacgaccaactcgagtatcgcccccaatccaaatcatccgcggaacaaccatctatcatcaccgatgtctcggaagctaccgcaactttccgccaggccttccccggcgttggtggtgctcgggccccctcgaatcgctcgtcgtcgagttccctacaagccctcaacgaaggtatcgtggtcgatgtccgatcggaaaatggaagcattggaaggagcactcgacgagcctcgagacactcggataatcaattaccagtttaccccgatcaatcctatgcctccctccagtctcaggtgcatcccacctaccaccctcacctcgccgaaccagatccgctacccagacactcctatgcccgtggtgttcgtactgcgggcaacactccgatatcgagccccgggctcttctccatgagacactctcgcatgggaacgccatccgcgtcggacgatgacgtctcgacgcgaagctcacttctccatccgtcacatcttcaaccaccgaaggaaacacacaccgccgaagttgatcgcgacataatcacgggaaacaaaaccatcaatcagtatgaaatccttgaagagctcggacgtggtgaacatggcaaagtgaaactaggccagcatattgcgactaagcagaaagttgccatcaagattgtccagcggtactccacccgccgtcggttaggcaaattgggcaacccagaagacaaagtgaagagggaagtggctattctgaagaaggcgcggcatccaaacgtggtcagcctgctcgaagtcatcgacgatccgaaccgacaaaaggtgtacattgtgctggagtacgttgagaatggcgagattgtctggcgcaaaaagggtctacgagaaattgtccacgtcgacaagctacgtcttgagcgggaaaagaatggaattccagacactcccgcttttttggaagagagccaccaattcattcgaacggctcagcatctgcggcggcaacgggaaagggctcgcgaacgcattgaagcacaggctgccgatgcccagcaagggccaatccctgcttggagtttggagcacggtgcggagtcttcagatgaggaggatgacgagtctggtattcccatgaggagaccatctgttgcagtaacagatgactcaagcccatccttcacgcaggacccgtctctaagtgctatcgagggcagcatgtacggcgcatattcagacttcccgatcgaacgacgttccagcacagcctctagtagctttggttatgcaccatctgaacccgagtggtctgcagagggcgatgacatggcattcgttccttgtttgactatcgatgaagcccgcagcgcattccgggactcggtacttggcttagaatatctccactaccaaggtatcatccaccgggatatcaagccggcgaatttactcgtcaccagcactcatcgggtgaagatttctgatttcggtgtttcctacctgggacgcccaatgcgggacgaggaagaagagcaagtgggcgagaccgacgcaacggagttggacgatgcgcgtgaattgtccaagactgttggtactccagccttctatgcccccgaactatgttataccggcgatgatttcgtggagactattgggtcgatccccaagatcactggtgccgtcgacgtttggtcgctcggtgttacattatatggaatgatctttggtcgcctacctttcgtttcggatgatgggtacagcatgttccagaccatcgttaagaaggaagtcttcattccgcggaagcgccttgtgcccgtgatggatgaagcgtccgactctaatcagtggaatctgagaaatgatgatgagctcgtctatgaggatatcgacgatgagctatacgatctgctcatgcgtcttttaaccaaagatccgatcaaaagaatcaccctgaaagagatcaaacaccacccctggacactccacggtcttcccaaccctcgagtctggattgaggagaccgaccctgccttccaaagtaagggtaagcgcattgaggtttcgaatgaagaagtcacaagcgctgtcagcaaagtccctttcattcaacgtgttcgatctaatgtcgccaaatggttcggcagcagccgatcgaaggacaaggaattccgcaagcgcacatcgagcacaacaccgtctaccgagaccctgtcctctgcctcaagtaacagcacatttggaaaaacctcccgcgacagtcatcgcttcagtttgcgaggggacgaggaattcttccggccactcaaatttggcagtcaaggacatccgcttgcccagagcgttactgcaagcccggtggatgaaggtgattgggcatcttattttgacggcgagcaaccagctgcagcaaatcttgctgctgcgactaagcttgccactccacctccacgccgacctggtcctcctcgtcgcgcacggtcttcaatgtccacagcagaatccgcaaagacggtcaagccatccagtttcgatactccattgacggttcggccgttttctatcatcgaagccctaggtcctaccaacttgggtagtctttttagtggagctactcgacgggcatcacgaggcagtcatagtcggcgcagttctccgtctggcgagtcggcatctcgacatggggatagagaacgtcgctctgctgagcctagcatcgctgtcagcaatgcatctgcccatggccaagtgcgcacccccggcctgtggcatgaggagaaacactcttctgcccagcaattaacacacaggcgcaagcgatcttcgaagatcgaggatccatcagctgcagaatctctcaatctcacaaggaatgcactcctgcgtcgtagacggagcgatattgatgcaaatgaaggcggtactctaagagttgactacgcgatgtactctactgaatcgctccttctaccacctatcactccagctaccaaccaagggtgtgccgccgacactaacaacgggctggccacttccacctcggccactgtatcttcctcttctgccgacgacttcaccagcggcatgtctcagagtgcctcccaccccagcattccgtcggtcgtctcaaacgcatcgtctctttccggtgacggttactcggtcaagggaaatgacttggacgaagtaccctctatgctccgaaccggggagacactcaaaccccttcgtactcatccgaactcgcccaggtcgtccgaagaggatgagtcgaggtactactgcgatgacgaggacgaggatgagtcggaagatgaaggccttgtgattggaaaatgcaagcctcctcccaaggctgccgcatcgaatattccgtcgcagccatcgaactgaaatgtgaccggtcccgatcgttccagtccagtccatcgttccagtccagtccacctctttacatttgatcctccccgcctaccgcattatcacccaccacttcctccatccctcgacacttccttaatatacctagtgaagttgttgtatatcatcgaatatcgttttgatactctttccgttccggttctcggcaggctgatatctggaaattgttcctagaaattgttccatacattctacatggtctgtacatatacatgaacacacgtggatatccatcgatgcctccctgtgaagggcttactggtgcccaccgaccggctgcgtctgcatgtctcttctgttctgttctgttgagttcagtctctgtgactatgaatctggagggcagagagtcccacagtgcatttcatgggtttctcttttctttctctttccttctgttcttctttcttggtcttatgcatgaatgaggggccagattgctttttattttctaactgtatgtaatgttgactctgtcaaaaccgggcgggttgggttttggtgccatattttggattccttgatcctcgagggactgcagagtttgtctcttgtggaatttgagcaatcgcgacatgacatgactgatatatgatgctgggaggcaagacgtctagcgtgtgatgaagaaatgaaatatttggggttctgggacttttggttgtatccctcccctaagacgaatttgttttccatatattgtagaacaccccttgtacggtagtctccaaccgccaatgccttatatcagatttcctccgagccttttctaagacgtaatggagtttccttccgctttctatggaagatagtgggtggataatgcggaatttgggattagttgcgatgataaaatttccgctgcttggtcgactgacatttgatgaattaagggtttagccatgtcagatttgatacctagctagaaccagaggcttatgcaaggagatctgtgaagttaggcaacagtcaggaaagccaggaaagatcgaatggaatgtacaagtatagacaaggcagactgttgaagtgcgccttggccaatagcttatatcctgcatacctaaataggactagcgcccatgggcctcagctgcgtggctgtgcaaaagctaaagccaagtcttctttagcgctgacccctccactttgggaagatcggggaatgcctcatggcctaatatgtgtatattcaacaggcagcgtcttttttttcatttcaatctctgagaatttgtataaaaatagtctgtgttcgtctatctgttatcagggtggacactgataatgccaatgtggggagagatctgctttaggaggaaacttgtacggagtagaagaaggtgggaattcttccttttactcttcgcgcttagcccccacagggaaatattatcggaatatcatatattaaatcaatcatccctacgagagtcctccgtacagcattggagtctacagcacgcgagttgctatacgacaagacgtgtttgacctagaccgccttgcgcacgtgaaaacgcctgaccttcaactcctccctcatttactctctattgcggacatctcgtcaaactcaaggtatccttgctcttagagatgatgaggcagtctgccgaccgctgacaactagctcagaggctccttcgcgtaccggacccgattctggacccttgcgaatgacatcccactacgtcgtcagacaccattcttcctacatcaccgggcgtccacgaccctgacaggcttgcctgtctaatctgccccgtcgctgaatttctgcgctatattctatccctgctatccctcgtctctgatcacaggttcagcctggccttcgtgaaagagcccccacccacgcgcattcgcaaacatgacctcccatgaccagaaccacggcacggcctattgtccggagcatgaccagaaccacggcgcggtctattgttcggaagatatgaagcatcggagcataagcccttcgccgcacggccaacaatatcacgaccccaaccccggtggattaggagttgacccctcctccatggccgcttattccacaaacctctcctatcagaatcccgacggcagcattggcggtgctgagatatatggatacccaaactaccttaccggggcgcctttgacacagacattatcaccgctggggggccagggctatgctccaaccatcaataccaaccttccgatatcgcagtcgttcgagacaagcctggtcaatcagctcgagcactcttcgacgggaatgagacggatgcagggcgatgaaaacttctccaatatgctcaactccaatcacccagaattggacttctctctctaccagaatcacagccccaacagcgcttccacccccgagtacgattcttcgttattgctagacccgcaaatgcaacagcatcagtctatcaaccaagcgataaaccccgctgatctagtcagccccatctccaatccttctgtatcctcgcatccatcacaagatcagcaacattcctcacctggccccatgtcccctccagggtccacgccgggtgcatactatacccctcggcattcacgacacacttcgcttgacccggctactgcggcgtatttgagcgcccagtcaggtccagactggcagtcggttatgaataatgtttccttccaaggccatcgacgtgcaccgtccgaggtgtccgaagtatcgtcggccagccactccccttatttgtctcagcacgaattcgatggcattgagaacaatgcatcgccttctttgattccccaaaatgatccaaatctttacgacaatggcctaggcatggaatcatttacgttatcggaacagcatcagcaggggatcagtcctctccacagcccatatatctctccgcggttgatgccacaacaggggaatgagatggtgccgaataattcatatctcactcagttcccctctgcgccgacagacatgtacggaatgccccaagaagacatgatgaacatgggccaattgaataacatcccgggcgacattggtcaagcttcacagatggctcctccatcgatcaatgttgagtttgccccgccatcacgagctccaagcttcggcccagccaaatcaacggcagactttgactcactgagccctccggctatgcgtaagtgacgatttacaacagtttgattcgtacgatactaaacagaacttaggatcccgtgttcgtagcaaatctgatccttatcaccctgcttcccgcccacgctctcctgcaacttcagcagcttctctagggccccgcgcacctgccaccccacgatctttgtcccctgttggatcgattggttcgcgcagtagtcccagttcgcgagatccctcgccctcacgatcaaaccgacgcctctccacctcatcaatcgagaaccggaactacatcctagatctcgccgatccacaaaggcccggagcagtacccggggagccaaaaagaattcagaaacacccagctaccttccagtgcaccctatgtccgaaacggtttacccgcgcatacaacctgcgatcccacctccgcacccacaccgacgaacgaccatttgtgtgcacagtatgcggcaaagcattcgcacggcagcacgaccgcaaacgccacgaaggcctccattccggcgaaaagaaattcgtctgccgcggcgagctctcgcgaagcggacaatggggctgcggccgccgcttcgcccgtgcggacgctttgggccgccacttccgctccgaggcgggccgggtatgcatcaagcctcttctggatgaggaatcgcgagagcgtgaccgcgtcttgctagagcaccagcagcaacagcaacaatcgccatccggccatctccagccaatcccccagccgctcgttatgcccaacatgcccggcatggatgggcaatcgacgggcaactttattcttcctgctgctcttctggcgcaatacccggctttgcagacattgcagtgggaccagatttcggctgtgggtgatgatccgagtgatattggtgggcggagtagctttgatgctagctctggtggagaatttggctttgacgaggatgattcggggatgggcggttatggtaataaccaagggggtatgtacggtgtcgataactctggtcagatgctgggggtcaattctggggaccctgggtactctgatcagaagtggactggatgacactggttctgcttgctgtctgttccctccttctttcttcctttcttcttcctattttcttcttttctctttttcctgctattccaggtttcaaaaggttattgcatgatgcattcatctgcacaaagccgattcttttgctttcgatgctgccagtatagaaaaggcttgttggcgttcatatataggatgctctcggagatgtctgaggatttccgaagctcggcaatcaggacatatgattgtcttggtgttttgtttttctttttctggtctttttagacatcggtgtttattatgccgtcttttgggtcgttctccttctattgatctcccgacttcccctttgcaggtggttactattctacccatctcattacttatgaaagaaccgggcatcatgatgctcttttatgatattcccatgctcgtttcatgcccaacttcttttcttccttccttcctttctcttcttctatcatggattctgtctcgtttcgatgtcacagcttcaacactatataccataacatacaatggatggctcaatcgaatgacttgaatctctcggtttagtacttatttactactataccaacttggttttgcacttccactccagtgaaccaggaaacagtagaatacagatcacattggatatcatctagtcggcaaaacaaatataaaaccatcaaaattcatcatatacaaggtgagaggactacaatatgtactccaaccaaatcatcaactccagatcgaacccaacccatttttatggtgtcaaaacagtctgcaatccacctccacctgctccactctctctttaagagtgagccttcttagccaacaggttcaaggcactaccagcaaggatgaatccacactgatcctgactgaaagtatgctgaacagggacctcgaacacctccccagtcttctgcttagtgacacgcagcttgatctcaccctgtccaccagtctgcagcacatcgtaaagaccaacagtatcaaccttatcacaagcatcgatacggtcatagtcctcacggtttgtgaaggtaagaggcacaacaccctgcttcttaaggttcgtctcgtggatgcgggcaaagctcttagcaacaataacccggccgccgaggtagcgcggctgcagcgcagcgtgctcacgcgcagagccctcgccgtagttatcctccgcaacaacgagccacgaaattccgcgctccttccatgcctctgctagctccgggatcccgtattgcttgccggcttcgtcgtaggcaacgttcgtctcgccggttgcggcgttgacggcgccgatcagggtgttcgccgagatgttgggcaggtggcccttgtacttcagccatgggcctgccgcggagatcgtgtcggttgtgcactggcccttgactttgtataggacctgcaggccggagagatcgcccttggggaagggggcgaagggctcgaggagggcgaggcggtcggaggtcggtgagacaatgacttcgctgcttgcgtctgggacggcggctgtggggaggaagttggggttgccttcttcgaaaccggcgctggggaggtcgaagccgctggggggctggaacttgaaggccgagccgtctggtgcggtcagggagtcggtcatagggttgaaggttgtgctgccggagtaggcgagcgcggtaacgagttccggtgaggcgaggaagttcattgttcggcggttgccatcgttgcggccggggaagttgcggttgtaggaggtgaagatggcgttatcttcgccattggggacgccgtcagtgcgcttccattggccgatgcaggggccgcaggcgttggcgaggacgatgccgccggcttcggagaaggtgtttagtgtttgatcgcggtcgagagtggcgcggatctgttcactgccgggggtgatgaagaaatccgccttgggcttgaggcctgctgcagtggcctgcttgacgagatcctcggcgcgggtcatgtcttcgtacgaggagttggtacagctaccgatgaggccggcaccgaaggtctcgggccacttcttctcgcggacggtgtcggcaaactttgacagcggcaccgagaagtcgggagtgaagggaccgttgatgtgcggctcgagctcggataggttgatggtgaccacctggtcatactcggccttggtgtcggcgcgcagcaagctcgaggggccggcggaggcaacctcggtagcagcatctgcgacgtaaccgcggtgggtggactgcaggtagggaaccatactaggcgagaaggggaagatcgatgtggtagcgcccacctcagcacccatgttacagcaggtagccatacccgtgcagctcagggtctcgacaccagggccgtgatactcaatgatgtagccagtaccaccgcgaacggtcagcttgccagctagggatagaatgatatccttaggcgaagcccatccgctgagcttgccctcgagacgaacaccgagaaccttaggagccttcagctcccaaggggcatcaaccaacgcatcaaccgcatcggcaccaccaacaccgatggcaatagcaccaagaccacctccgttaggagtgtggctgtccgtaccgagcatcatcaatccaggggcggcgtagttctctagcacactctggtggatgataccggcacccgggggccagaactcaataccgtagcgcttggcggcactctccaagaagtcgaatacctcactgttacccttgattgaagccggcaaatcggtatcggcaccacgctcgccgacaatcatatggtcgcagtggatactggccgggacggcggtggagggaagaccgcaggacatgaattggagcagagccatctgggccgaagcatcctgcatagcgacgcggtcgggcttcagcttcaggttggccttgcctcgaatgtcgcggccgttgttggtcccggtgagcaatgactcctcggcattgtccagatgcgcgtagaggatcttctcggcgagggtgagggcgcggtcggagccaagaactcggcggacatgttcaaggttgcggacaagcttgggatatgggggcatgcgggaggaggaggcctcggtggctaggccacgggcgaagagccgttgtgatgaaagccgtgtggccatctataaggtgttagattgttcaattgagattgtcttcgatgtatacataccccacgagaggcagaaacccgctgccaaactagctggctcaccatcttcactaatgttaagtttggggagaaactggggagaagataagaatgttccctttttttttcgtccggttgttatttgtatccgctgtgattggccggtgattgcgccgatttcggaatccaggcctctattatgtggggaaatagccctaaagaacttgtatctacggagtactccgtgaccatactggcgctactatgcatgtatgccatcatataagatgtcattattgcttcttcttcaaagaaaaagagcggtaccacctttcggctgcacctgtttagggctaaatcttattctcgatacgtggcggaatacggtctcccgaattctccttccatgtccaccattttcctagttttagcatcgttcggttttctactactcgctatgagtgctaagctcaacattctccagaaggacaaagccaccgagcctcaggcaggcgagatgcaatcctccgaggaacttccgacttatcaagagatcgcaaagtctcccgagaaatcctccgagaaagatttgctgtataaaacaaaaaatgctcagaagcctgaagaccttcttgtccacttgctttcaaccgaattgaatattgacgacaaaaaaactcttattcggaacgccccgagtcgtatatatgacagcgaccatcaccgccaaaatgccgagaaggttgaagctcagcttaaagacgcaggctacagccagcttgccatagtgctatattggtgtttcttttggcatggggtacagccgagggggccagaaagctggatcaaggaactgattgaaaatgatatcgagaggcgttggattgctcaaagaagagcccgcattcaagaaaaagtccaaaccttggaaacctcatcagatctacttctatcttctgaaggtgaagctgaacatgcctcacaactcgagttatacaaaggactgctccaggatctcaatagaagtcattgggctctttccagaaagagttggaacaaacgagaatccataaagagctggtcatttagtcgagcatataatatacaaagatcctatccagattggtatctctctacttcgttgagcgatgattgcgcaggacgaggcggctgttgcgggcggagctgcggctgctgtgaaaggccgcggacggttgatggattcgaagatcatatcggcaccagaggccattgtactacagcctgcagttgctgcatgaaggcccatggggttgaagacttggatgacttgttagttgaagagataccagacttggaagagctttgttttgagtacaagaagccctcttgtatgacacatcagagcctacggctgctgatgggttatgctttcaatttacccaaggcggaatgaagttaacagatttacaactagaatatgaggacctgtgaaaatgacgccgaaaataaccccttttggcgccagaaacggccgtctttccacccgtaactttggagggcgagcgggcgctttaccgcccaccgtccagtacgatcactattttgcacctaaaacttgtgtcgcgcttattgccccacccaaacagctccagcgcgtccctactatctagtgcgtccttatgtatcgtccagtacgtccctactctccaatgtgtccctactctgccactcctgcaggatcgtagacggctcgccgctctattcagggcactcagggcggatattcacccacctaagtatccttcaccacctgcatctgtacagcaaaggtacattttccaccatggccaaaaagttacaagcagccttctttccccctatatcttcatcactctaacctcgctttatcacaagcaagatgctttccaaacatgacccaatgttgaaatatgtgatcaatgttgggggtttcgggggaagcatagtaattatgaaatttagcggacagtgtttccacgcatggaatctcgttacagtcacaagctggttagtacacaattgccaccgaaacagctagacgccaccgtaaatgtacttgcggcggccgacgatccccgacaggtccgtacgaatctctgcccatgctcgcccacccgctgccggctgtcaatttaaccgtgccggtggccctcactttgaagtcttctaatgtatgcgccaactgcaaggcttgcaaggcttgcaaggattgatgtgataagtctccgccacgctgtcactactgtcctggtcgtcacggtcaagaaagcatttccaccttcagtaagcctgcgaaatacgtccatagaagccggcacgaggccagacacgcctcaaaaaaatgcctgtatttggaaccctggtataaaattccctaaggactctgggcaggatctgaagatattcttacgagcataccgtgctccttgtagggttattctagggtttctactgaacagaagaggctattgttcgcgaggccaagtgggctcgacagcgacagcgacaggcgatacaagctaaattatacgttcaagctgaagtcaccagaacgacagcataaatgaattgaaggagataggtcaagatctccaatcccttgagaatatttccgaggcatcgtcacctctactaatgactttatgctgcacttcgtctggagcagcaatcaaaccggctttacctgaatgcggccagtattacaaagatatcttccatcattaaatagcaaacactcataagatattgagattgaacctggagtttagtctatattttacaaaatccctcctccaaatcctttatacctagatgaagggcaaggacccgccggatttcacaccaaatgcccttccgtgcacttataacagcatcttgacgctctgttgcaagattgtaatggtatttttgtgccacgttgtctgagatgaagtgtaaatacccgaataaaatattgtgttcctggcaggcttgtgccaggtaaccgacctcgcagtcgacccagtccgctctatgcttattcttggccagccaatcctcattctcaaccaatgggcttggaacggtaacatgaatcccctggcaaatgtgggccatatgccctgctgatagggtggccgtgagtggacttttccaagagagagttttgttgttgaggagacttgtttcaccagtaacgagggcctggtttggaatatcttgtgttcgtaatgaaccagcctttcccacatatagaacgctggatatattgttctggtcttgcattgtgcgaacaacatttccgatgatatcaccccagaggctcatcatgcttccgacaaaagcgatgatactcccgtcagctcgacggaagtgcttccacgcaaataactgattcggctcatgtgtccctgtctcccaggggtaatcatgattggtgaccagttgatcaacataccctaggatgacagtatcaacaggacacataaaccgtaaattcgatttcgagagaagatccaggcaatcttccgaagaagggagtcgatattgtatcactgatgtaggcgcattaatcgagtttaggttgagataataagcgactaggagggcgtaatgcaggacgtagtctcgccccggaaaacacctaacctccagagtcgagtcgtcgatgatcactgctgttggtcgatgccagttgaaacgtttttctcgtttctcagtgggcgaaatatgtacattggggccgtttcggtcataatggccacagactacaatgtgaggccagacacgggtcttgatcaacgggtggatcttgccatcaacgtatgtctgaagagtttcgtgcatcagattttcgcctgccagaagcgagtcatggtctattcttcccacggtcatgctttggttccagccgagaatccaacgggcgagttggactgagacgagtgttgagaaccggattaagtttatcccgctcttagtttgtttactgtacaagaaatgcttgcgggcttataacatcgcctaaattgggctacttgttgtcttttgctcttcaaacttttttctggggcaaatagaatactcccatttagatatagtctatccattgatctcttttgaggcgctgataaatgtcagtgttatgatttattaatcttacatgatttgtaactaactagttaactaacgtattcggtaaacgagctgcgcaccccaaaacactatagtaaatgcaatatattccacatttatatctcaacaaccacgtctcaacttgctttcattacttatcgatagtcatcgataaggattcttagcaatatatctcaatttcaaataaatcagaaagttgcatcattgcggtattgaaaattacatcactgaactataggagatatatatatctcaatcactattatatcaaatttctcaaggctccctagagtgatcagatatcatatggagagtaatgggctacaagataaagtttatattgaccaccgttgttgcaatatcatgttgtaatttatcgcatttactatgtgttttggggtggccgactcgcttgggaaatacgttatggggcttacagctgactaatgacaaaacataaacatggtggagcattctcggtaatttacctccacaatacaccatccgtctgctatctccaggtcagctatcggtatctctctctcttcctctctattcctactcccgtcggcttcgcttggaatctaatacctttcagccggaatcagacagttctcctggtttcaggcatcttgatgtctgtctctctttggcccaatgtaaatttcatcgtttttctgcgaacagtctttcttgaggacgggatctatataaaccgacctaaaaggatcagaccttaacatctccaggattttctatgtcatgcgagtaaaatctttgagaacgtgttcaaatgtttcggggaactcttgctaattgtatgtgcaatttctcacgccatcttttatactgtccaacaatcaaacatggtcgacccttctatagagaggaaccataccaaagtgtacattgttacggtgtcgagcgcaaagtagtacgccgggagagccaaaatttccacggaagccctattgaccgttccaaagatcctaagttatcagagtcaatattctcggatgttctgcttcggcagaaaatgccacctatgagggcttgcatgcgccagatccaagcatgcaagttgaactccagcatgaaaacaaagaagccgagtatggttatggggattgtgcaaacgaagaagatccagatttttggatgtgtcttccactgtagagtctgggttttttcgttctcgtcgagtgtgaagaaattcattccgaaaaatccctacaaatattttcagcatgtctcgtggtcaaattctagatataagggtcttactgagatgaaagttcccggcaggaatagaagcgttaaggcggacacggtatcggacaagactttgccttcattccgagtttgcttgagaatgcctttcgagatgttgctattggcaacagtgacgaagttggaggcctattgaactctgttaactgcctttactttaaagaagaagacgaagaagcacaaatggtagccattcttctttcgcaggaggcactaacacatttgatctcattatccatgcgacccacaaacgccttagcccggaaattcaaatttgtgatcatgttttgatacaataacagcgcttttgaaagttgtgttgttgctgcagaggaagggaaggttgactggatccacacaccatggtctcgtacgatggcaccaaggttattagaggtcgcatccatggactcagaaatatggatcacatgtcgcgataattcatgaagccgactgtatcgtttgacaaggaactcgaatgtttcatcgttatcgaatgatccagttttcataaacaggtcctgaccgcgaccctaggatttgttagatattcatctcgtatataacattgggaaatggcaataccttctctatatctcggaccggcttttggaagctccagagatcatcctcacactgctctatcacgatattgagtgcatacttgagcatgagaaagggttcgttgttccagtttctgaaatcggttttatgcagcagacgtcttagccggagggtaatatcatcatcaagatcgaagcaaagtagcacattggtctcgtcggtagatccatccgtcctcacttggccactgtctccagtagggttgataagtgatgaccgccatagggtacagaatgccatatagtgccaggcgtactcaaaatcaggcgcaggggtggagagagggtttgtattactagaattccctggattcaatgtcctttcagcgccctttcccttgactcgtttggaaagaaagcgcgaaaatgtccctttgtgagcgttcctgttagcaatttttggtggctatgataagctctacgtttttcttcttaccatagctcgtttctgagtcgttttgtaagaaattgacagtactgccgaacaagccatttgcgttccagcccagtctttcaaaaaagaagttaggaaggaagaacttttcagtcaactgcctgcataaatctgcactccctgccatcttcaatatcccttcttccacttttggcatgaagctgagatacataagcaagcgtagaatctaactgagatgtggttctcacataacatgaatacctggctttctcaagaactatatgatacctattagcaagttaccatgatacatttgtttttttccctctgactgacatctttttgcaaaagttcagtccggcttagttcctgaggctttggcagactttcgtctcccggtagggatggttgcggcgggctagcagttgtctcactgcctaaaggctctatccatcgccagtagctgatatttgttgagtgatttactgacatttctgaagaaagtcatggaatgttgttctcgaaatttggcatcgggagtggtggggaataaataaccacgctcccatttcagcccccacacattgcgttcgagggcggcacagcgcatgaagctatctgcgagttcgttggctggggggcgtaattctagtgcagattgcttctcgactcaacacccatcatctgaggggtcagtttgcggtcgcctggcggcagatccttaccctatacatttctttttttctaaattataattctgaagggtcggaccgcaaaagtttccgcgaaccagccccatcgccaaaatatatatttcaacccacatgcttgaaacattaactagacataattgttaaatagccaccatatttaaatgtaaaatttaatattctatatatcaccctttagacgcaatgttcaatcattgaagatagtgggtgtaattgcgcaaaggcggtatggagaaatttccgcggaaacctatgcggcagaactacccctctgagccaccccagccaggcaacaatggaggattcaaatgagccgtaacaaggaagagtgaactctgtatgaattgctttccaagctaaagcaagcttgtcaccatttcgctttcttaattaattacttacttattttggaaaatggccctggtatcacggactgctgaaaattttgttatcattagcgaaacgaaattcaggaggtaaacaagacaaatagcaactaacagactgcaaggtttctaattcagtatacgagttcggaatcataccagttcccaaggacgatctttgttcaaatcggagtgagctcggtggctgggaagcaggaatcatatggagtatcggtgtgagaatggcgaggggggggatttgagcgttgggttgcggacagggttgcaagagcaatcggctcacctacctttcgagagatgcaggtgaccatacgacatctcagctgaaggatcggcgcaccacttcttttttttggtctgagaacttggccattgaccttgattttctttttccaaggtttccaacaccttgtgaatttgaatttctcgaatcagctttgacataacatgcatgtttgcctgcagtatggtaatgtaactccgcacgcttggccacatttcaggggtgataactgagtacaatggttgaacacgaagcaatcttgttgatctttacacggagtactctgtggtatcgttacactggagcacgcaatttcagctgcagcctaatttacaccctctgagcctcaggagaaaggtctatcaatgttcaaggcctgtctccccatagagctctatagagctattggagatccagcagtcttctacaacaaatgcagataccactataacgccgggaagcatccaacgcatacggtatctcacctcgcagccccattcttaatttagacaatgagagaaaaattactgattggggtttattctgtcgccgccatcttatccgcactttaacagacaattgatttacgattcaacacagcggttttggcaccgggacagcttagggcgtaaatgggtagggcgtagagacgaccgtttcttaaattccaccgatggacgtctattacgactgatcgtgcagtcgacaaccagtgtgaagttacctggcgtcgagacatccttatcgatggcatccccgccatcctgaaagtcatgttctgggctttagggcctcgcagtaaaaaaaaaaacgtgacatcaagcaccccattacacggtggagctacgtccagcacttccttaattcgaaagaatcactcaagggcgcaagtggaaattcggttcaaatacccagtcggcgctgtcataattcttgttttggtttgtctcccatattattaacttattattgtatctttagtatgttgacacctgctaaatagctatttttttcttacggatcttgctggggagccaagatacaacggtcaatatgagccgtttagatatcattactggggctacacgcccatttcaagcaatccctatgaatgtccaacactgccagaaaaccctgatccagcgcatgagcaacgcaatcctacctctgaacgtcttgaaagaccgcaatttctgtgtttcctacgcgaaacatatagtagcaacaccttgaaggtcagtaactgggagaaaaaacatagagacacaaagacactacagtatatctttattgcgtacacaaccatacaattctcgcatgaccagaagcgcgatgacatggaagttctacattctattgcggagaaggcagctcgtcgtgcaggagttcaagtctattggcttgcatgcagctgtatgcctgaagacaaatacctggcggacgacgtatatcggatcagcgatgtagtacgtggcgcacattcgctcgtcaatgccgttggaccacctggtcaaggccatgaatcccgggtttacaccacgcgagagcttctcaaagaatggggtcggcgaatgtgggcatttcccgaggtccttctatcgccaaatacgcatccgatattgatttacacccacggcacatccgagggagaaccttggcagaaacccaaaagcaaatttccttcagaggcgtgggttgacgcctcaaactcacgccaactggtcggtcattacgaaggctccatcatgttgagtcctctagagcttgtgacaattgcattccagtgcctatcgactaggcccttgaaagaagaaagcgaagcagatatagcatatgtctttatgggacttctgagacgcaggcccagagtcaatcttagcgacagcgcctttcaatctttctcgcgtctttcaatcagtaatgatagcgataaattgcttgaaaggcttatatgtctgcttcccaaatcaaccaagcggaaatggtatgtcatcgacgacatatgggatcgcaatttatgggatgttgaccccttctgtccagtcgtcggtgtctgcctaggagattcggttgttctcagtggggcatttggagcctctattcgatggaaataattcaaatctgtgagcctgacccataggaacacagttggagggttaatcacaactttggcactgcgcgccgcacctgtgtggttaatcgtctcagcaggcttactgtctgctagtcaaactacagggtggaagatgatggtgggaatttacgcgccacttcggcatctaaagcattccaaacagccagctggatttttatgggcatcactatccttcttggcgctctttctcccttgatggtatactcgctttatgcaggcaaaacttggtctgctcaaccctggctcttcggattcgaaggctacctgcccacccacgagattgaagctcttgttattgtagtcaacatgaaccgtttggcttggactgggtacagcagtcaactatcgcgccactgtatggttgacggagagtgtattgggagaaaccctacggaagacccgaaagtcaagcgcatagttgattccagtgcttacgctacgtacgaggaaccaaaggttttcacgttggtcgacatgtttacaatgacggtaacactatttcaagccgtgaggccgccggtgtctctgctcctctgtggaagcgagggtggtatgcaccgcggtctactctgttcctgtgactggcccacataaagactcactcgggagagtgtcttacgagtcgacactcggatgcttgacaaaatggcccgagttggccgaattcgcattggactggagaaaagcctgcatgatacctccccaatgtatgcgtttgtgaacaatgatgcgaatccaacctgatgatttaatgtacgattatatgataggaacgtggtatatacaatatttaacgcgtgtcatacccatgtagaaatggtccttctccggaaatccagatggctctggtggtgagattcgagtttcttgatcgtgtagttgattctggtcacctcctaatcatattctgacgggtttcacgcatatccgcgagggagggcaacactaacctctgctagtatctatgtgtttctactttgaaaccctggataacccatataatatctgccttgctatttatgggaacaattgccattctatcactttctatttacctgtcggtgcgcttcgactggtcgctctgcttcctatgtgtgctttattgaccaaaaaaggtagaataaccgcaacaatttattttcatcatttataatcgtcgctttagctagtctcagcttcgttcatgcccaatataattagggcctgggtcatatgtatgaggccatggcatatgcaaacatgtactttcaaataattttggcagtatccgcgcctcacggctgccaggaaccaacgagtcttgtgggtggtatccattggctcaatagggttgttccttgtttcattaggtttgactattgtaggattatcgacacgaaagaacaggatgctataccatcccagtggctacgcttctagatgataggcattgcaagctggatgtcagatcgagcggcatatccggtaaaaatgaaagaggcagtgcgtcgggctgaaagcaaatgcgcagtagtcggtggggaccagaataaaagaagggggcggcgatgagtgcaagatataggggtaggaagaatgaaaaagtgagagagtgagagagtgggaggaagagcagcgaagacgggtcttttatgtcgggagcattgaagggaggttacgtgacagcgtattggggcgctaaacccagaaaggcaaaactaaccgcatatggtagttcacaggtccgccgtttacaagttggattcactgcgaaatcaccgactggttcttttgttggatgacattgctacaattatgtcaaacctgtctattgctttagttgttcctattattgctgttatgctggttctggttgcaatccaagattagctgttatgattgacaactccttaagcggccgcaacccaaaacggtcgttgaaattattgaaattgttgacgatgtcctttccagagacggagctattacaagatgatgatttttcaatcctcaaatctgctaccaactctcagtcctcggaacacctgccagttatgaagagaccacgcaagactaagcctcgacggtaaatgcaagattatagaactagcacatctcgattatatctctttgcgaagataaagaggctggattggttgaaaatgcacttcggcttcagggcttgtataagcttgcccaagcggtgtgctatcattctcatatcaaacgaggctcacaagacatgacttgatccgattgatgttgatattgaaacacgctggattgtccaacgaatgatttgggtccatgaacagacacctttcatcccgggagcaagggctcaaaattctgaaactggcgaacccatagggatgtggatgctgcgagaggactgaggtcaatacagacggggcccgtgcccgggaccactgtaccacagcatgcagttgctgcctcgatgctcacgggattgacggtgaagttctggagatggaagacgtggatgaagttgacttcacagatcttgatccccattctctacggctgctcaagggaacgggatggaatgaatagtaaagcgggtgcttctgctagaaatattaaagtggggctttgtcttatcttcgcaaaggtcggaggtgtagctagaataacatgattgccaaattagctttttcatgtgctttcttagttgaaagcaagagacaacaaacaagaatcgttcgttaacagggaaattccattaaactcgaagtaaaaccaccagaggacaccgaagtgccctcgttcccaagacaaatgccaatgccataccatctcgaacgcctatcgtcacataaagaaaaagaagagaaaacaaggtaagactctgatcatacaatcaaagaccactgtatgccaaagacattccatggccaattcttcatcaaaatcggcgcaaattcacaaacatcgatggaaataaaacacataggtagagaaaaaaaggcattggtctaaagaacctgttgttttaagactctccttcctcgccaaccacagcggcacggagctcccaaaccaaatcgtagcattcggctagcagattattgacacagccctgtccctctgggatatctggacccacgtagaatttcccgtcaactcgcatgttgtcaatcgagttgagctgtttttgttagctttatacgcaagcagcgtggacggttacataccttcatgctgtatgggtaaagttcgcgtgaatttgcaacacccccagactccttgacttcaatcaagcaccggcggagagtttgaagttggttgtagactgggagtaaagcttcagataccggctctgatgaaatcaaaagcgcatagatgtatgcataactgcgacgaatgaggtatagaagcgtctgatcatgttagccagaatccaccaaagaatgcccgaaaataaaatcttactcgctgcgcatgcaggtccgccggctgaccctcagcatcgatgaaatttccattaacccgtgcctcgtcaattcggtcgagctttcgctggtatacgaagagatcggtctcgcgcagcgaccaagcttgtgttacagacaaacgatccagttggttgcggatgtccaacaatcgttcgtattgatctcggaaccgctcatcaattttgccctctctgtatttgaatcagtcgatgtctgtcatcccgttggcagcctagaacataccgctcaagcacaatttcagtccatcgccaacacctgtgaatcaaagacttgacattttcctgcccggcaagaacatttccctcgtcgtcaacaaagttgccgtcctttgccgtcttttcaattttcttcagttgttctcgaagagaatttacctccgcagccgagaactagcaattaacagtgagttagtactaatcagatgggttatagaattgttcgatgccatacttttgaccgagtgttgacagctgatgtagaccgcagaattgagaccagtgtctcgtgtgtctgcaccaaggaaggagccaatacagcaagacccttctgcaacttcgccagtgactggtcacagtgttccagacggctttccaaaagcgtgaggagagcgggtgagtatgtgtttcggccacgctcgagagtttcccgtgtagactctagtgtcttggtgatcgagttcaagtccttcgagctataaaatccagcctcttcaaggtggtcgagtaaacgctgcaagatcgtcagtacccagcgcgcaaagctaacgagagccgaaggagattataggagtcaatacctggatagtagtcgccaaggagtatctggcaaaatgtcagtcactgtcacaagatggcggggtaataacattatcgctcacactgcgggagcttcgttgttcttcccaactgtcaagaacagtagggaaatcaactgaaagcaatcatccaagatataatccactatcattgaacgtcagtcacctccaagtcgagcgcaaggtctactaaactcacggcgattgtgtaccaagcggcgatcttgctctttacgaacggaattgagtttctcgacttctgcgatcacttcctcataaagcggtaggacatcgcgagactttacatatgaggacttatcccgcttgattaggagcagcgcgtcgcgggtccggagcaggttttcaaggatgggctgctcccgcggatccagcgggaccgggatggcgggggactccatggttagagaatgcgatattatcagtgggcacgttggaaaaagcaaggttgagaacaggttggataaaagaacaagtttctttcaaggtgaagacaagtacaactaccgggatgtgatgtcaattaatgaatggatcgattgatagggggatcatgcagatacgaaacgccccgcgcggtttactgggggattatgtcatctagatcattatgtcatctgggctcagctccgcttgcggcttagcgccaagtcacgaggaggagaataagctaaaccagattagtccaagccctaagcgagggctttttcccacacacggcgcgtttgcccggttcgggtgtctatcattggcgttctactctcttcttctttcccatccccaactctcttcaagacacccagtccggtcaacaccacccgtcgacatgtctaccgccgagctcgcctgctcctacgccgccctcatcttggccgatgacggtattgaggtctccgtacgtatccaaaattccttgattttggtgggatagtggaggcttgaagatcgcacttgaagctttatgtactgtgcgaatttgagcttcgggagagacacaacgagacgccgcgaaaccactaggatcaaacaacaatcatgcgaaaactgtgactgaccttgaatcatcatttaggccgacaagatccagactctcatcactgccgccaaggttcaggaggttgagcccatctgggcctccatcttcgcccgggtaaatacctgattcctttccacaacccgcgccaatattgaagcaactcgaaaatggccgcgcgcgacaatttaagatgcgataactaattcgatttccaacacaggccctcgagggtaaggacatcaaggatctcctgaccaacgtcggttccgctggccccgctgccgctgcccccgctggtggtgccgctgctgccgcccccgctgaggccaaggctgaggagaaggaggagggtaagttttgatatacacctctggttttgagctcagtactaatccccactacagagaaggaggagtccgatgaggacatgggcttcggtctcttcgactaagcgtcttatcttcatatcgaatttaaaaactcgtttccttttttctctattcctcaacctcttttcccactgccgcatagcggctccctcgacgattctttattgtactcgatactccacgaaccccgctacgacctagaacccggggaagaaaaaaagaaaattagcaaaagaattcaaacggacacggacattcaatggagactgggtgctcggtgtgcctccgcgtcatgatgtggccgaggtagactggatcggataccgctgcgattccgaaactattgttgcttccatgattttaggggaattgaagacagacgtttggcacacttgttggtttgtccatgatcaaagttttgctttggtctggcgagtagatgtatggttcgttttctcgccctccacatggatcagctcgattttcttggtcctcgtgttacgtctgtctgcgaccatgaaccaacaacgaaggccgtctgattcttatctggggtacttgttcgtaggccatgcgacgtagttctgtagcgctgatcgccggtgttggatatgtttcaggtgtttcgatctcgaggtagtctttcattgagcgcaccaagcccttgcggtcatcgctcagcagactagagtccacatcgacgatacaaagtacgaagtataacatgcctagactttgagaatatcactctatctgtgttcctccataatatcatagtcgttccaggattgcgctattgcgagtaacatacccttagtattgatgtacattgatttgacactagcaaccatacgtgaatatatcgcatcagtcaccagtccactattaaaacaaacgctatgctattccaaacttttttgatgtccagcatcaccaacgaacgcatgcaaatcatcttccatccaaagacttttgagcttgaaaccaaattttagatttgacggtatatagaggtcattgctctagacgaaacagtcaaatgtgagcaaatgtcaatatttaggagatcgccgagagatgagggtcttgaacagcgtagatccggaattggaagaagatgacggcatcctcaacaatagttcccagcgatccaataagccaaggaagattggtgaggaaatactctttctctgtagaatggcaaagaatctatatgaacaccattagcttatgtccagtttatagtacaacgtgtagtatcactcactcctgcaccgtaagtcaggtttcccataagagagagaataaagaacaagagcgacaaccctagatcaaagtcaataccggcctgatacgtgcatgtgaagacagtgaaaaaataccttcgcacgacttctcgctccagttcttatagatctgaggcaatctcgctctggaatcaaagtcaataccaactcatcagccataacggcaggagacactcaccccagatagcacacggcgctgaaataccccagcagcagccccccaacagcctcctcagaaccattgttattatccaaaggcgccggcgcccacatcccggtctgccaagccatggtccaaccagtcgcaccaatgaggaaaattccaacaacactagtaaaattcttgatccatgccttgcggccataatcattctcctcgacgatcttggccagggtatcctcgacctcactctcgcgccggccaccagtgtgataccggcgcagtgagcccgacgaccggcgccgcgacgcgatagattcgctgaatcgccgccccagcaacggggtagtcggctccacagagacggtggacgagcgtcggcggtggagaggctcgggacgcgagttgcgcactttatagtacaaacattgcgcgatgagcacgccgtctgccatacagaagtataccgcgatcgcaacgatcacgggcacaagcccggctagtaggccaccagcaaggtttgcgacatcgccgacgaaccaaacaaagaggaagaggagagatatagcctctgagttgccattgcgataattctcaattagttgaggtacctgaaacagtattgttagatatggattgtgtccactttggatttcgaggtgcgagtctggttgctaaacataccaaaaggaaaaaccagcaggtcatagagactgagcccaagagaccagatgcagcctcacgggctgttaaaggtatagggccttgttccatgctgtctatgctctgcgacaaatgtgtgttggagtgaaagaaaattgcgcgggagataaggccatgacacaatctactcctggccagagtcccgccgtgtccaggccttaagggtctaagcacatatagccctggcggaaatctcttgacatatgttaatatactaaagtatgtgtattctggaataatctctttaaactagaagcatgttaattgactgaatttattattgcgggatgtgcatcagccaagcatattgggggatttctacagccaatgatacacttcattatggtaatacatatgtgctacatagttatgtaccggataatatctggcactcgagacctttccctttccgttttagtgctcacctctcgtcgcttttttatcactaagtaaaactgagcgcgtccctgagtaccgatccacttactaatcattatctgagcaccctgatttgctcactgagcgctctgagtatacggctgcgcggcctaagtaagctacatcaataaaatgcgatacgctaatcctatcacatgcaaccctttccatttagatcgcctatcaaaataggactggcgcagtcaacatggccgttcatcctagcggtctcgaccctatctactgtgccacgcgatcaagtttaccggctatgctgggctccttgatctccttcttcttcgacaactattgatataacattctcccgtcggcttacgggaagtaaccctggaatgaatactataaggccgtccattcctcgtttgtccgccttgcttcgaaagaaaccgtttcccatgccttctctagggctacctttaccgcccggcatagtcgttaataaagagatctcgccggtatacgattctaagtacttctacgcagtaaagcctagagaggtactcgctgatcgttaccaaaccctggttaaggttggctaggcgtatctttaatagtatagctcgcgcgtgatttacaagggtagccttcaataatttctgtttaattcgaagctctctctatctctaacaaatatataggcatatcgaaaagccagagagcgtcgtggtactaagaatcgccaataataatacgagttccactggtcataagcgtagggttaaagagtccatttctaccgcagacccgtcataccgcggccgctcacttatccgaacatctttagactcttttgaagttaaaggttcagaagtttcttattcgtgtcttgtgtatacgcctatgagggagccattgtccatgtatcagcggcgcttcgacgatagaaagatgccactgcccctccttaaaacatacattcgtgctcttcttacggggcttgattatcttcataaagaatgcagattagcttataggggtaagttcatccttggccttacgtcccgtcggtgatactaagcccgggcggcggtccaccccctccagaggtcatacaaaggtatcaatatatgcgagagtactcgtggcctggctgattgtcgggcacgtacactcatgttcttcatttttcgtgatgatctggttccgcctgaaagggtcttaccgaacactttactccgaggtggggaaaggagttccatacagtcttttgtatggtatgcctactccgtagtaaaggtacatatacatatgggcgatccctttcctcatttgcttggccccactgtatagtgttcgggtgctatggatatcaatccgagcttgtaacatcttacgctagtgcttgcaaggatttcgggtttccaaggtattgatgtacatggctattgcagaatacgtttgattcatagagtattgatcccttagactactatccatcttgaagctcccattactacttcagaacatgccatgaagtctcccttctcagtcctttttgccctcagccttgccctagggcaggctgcagcctatctcattaccccagacggcactcgctccccgggtagtaccgaagattacagttcttagatcgcgtacattaatatactacctgcgagttatgaagggatctatggtatcactgcggcggagtttgagaattgggtaagacgaacactggttgaactttgttgaaacattcactgaggcttctctgtcaaccccaatttataaccaagactggatcggactgtgaaatgctccctggtctgtactattgtgtgcagatcgattatatctacgatacaactactgtgggatttttttcagcgccagtaactgcaagctctaccgcgtcagtgtccctctctagcagccctgcgtctgtgactttgaattctacctcgagcaccatttcgtctttcttgacctcgctctcagccgcagctccgtctgtgacctcgacttcctctccctcgagtcaatgttcgaatttaaaatgtgatagtgaagtcaaggggcaagagaatatttgcagtcggtgcttaagcaatacaataaagtcgaaaaaaatagttaacgtgttgagttcagtggaatttccaacatagcccagggccatgctataaatgttactacaatctcattgttgtacataggatcatccaattattttctatgtacccagactaacacagagtgctaatcatgaagctgaattattctcctcgcataatcgcgagttcgtcctcgagcatgctgaccgcaaaatccccaagagagtccttgatagtgctgtctaacaatcgtcggcgagctgtttctgtgattgccgccatggcctctagataattcgtcaaaggtgcatagtccacaactacctcgctccaattgcctctatcgactccgtattgagaaaggaaaatacgaagagtttgcagaccctcgcgcgtgagccacccttcaagggccgccggatctctgagtggtgggcgtgagtgtgggatatcgaagtgctctgtatcctcgtcttcatcctcgaaaccaattggctcttcctcgtccgatgggacattgggagggcgggcgtcgtggttgatctggccaaggagatcctgcagccaattttcgccaccaccagcaggggctgcatataatggtgtaggttcagattgttgtttataggcttcggattcatagggagggagagggtcggaggatgatagtcggccagccacaaagtggtttggaagatgggttgtcactttggctatatcggacaagaccacatgacgagcgatgtccaaagtgatctctggtgggtcattgggctcctcgccagagatagaatctgcgacttccataatgagagaaatagcctcgggagtgttccaaaggtccttagcgcgggcgatgtagagttcggtaagcagctcatgagcgcctgtaggaggcatcttgccccatatttgcttggggacgtgctgaacatcaagttcctgtgctagcctgctgaatatccacgggtagcgggacatggcaagatgcagctgtcggcgacattcttggggcttattcaaccggaggtacgccattaccagggagcattgaatattggggaggttggcccagtcgcgactgaaccgtgtctgggtgcagagctgcacaaattgtgcatattctctacctcggagcgcgaggtggtcgatgagcaatctcatgcagtaaggatcgctgtcatccagactgagcaagagcttggcccattcataagcggttctccatgtgcccttcattgctaggttggtgatgtacctccacccaaccagccagagctctcggttctccgcatgcatgaaatcaagtctggcctcaccttccttgaggcgattggcaaacgaagagtgtactgagcgtccgatattgaatagggctctttccatcagatcagcagacacagcatgatcgccttggtgtttggcaatctctgacacttggagaagcgtagaaatatggtaagggttgtattggaggtgcccgatgagtctctgtgggtccatcgattcaacacagaggtcgaactgccgttgtacatcttggtaggccgtattgtgcactattcggtagagagtttccccggaaggaagcttctctacagtctccatgcctagccctccacttggagcacgaggccactcatctttaccctgcataagaacattgcgtcgcaatgtaactccagccagactttgacctcggctagctggactgtatcttcccgtcaaggcttgagcaaggtcgatcatttgtcgattgcgatcccgacgacggcccgttccattatccgttggttgatcaaagttttccagaacgacatttccaaacagtctgcgcatctcattcgtcgcattgagaaatttgggttcaatgccgagcaattcgctcgtggtctttgggaaagaggcctcgggattgtgtctggtagatagacctgcgccaaccgacgaatgcccacctgtcgataattctttcaaagcccgatcaatttcgtccaagtctccttcattcgattttgaaggcggggaattggccgaattagaggttttggctgccttcttcttcttctttttcttgttgctctttttgagttttatcggagttggttcaggctctggtgtgtgcgtgcgaggttcctcctcgatatcctcctcatcttcctcttcatcctcattttcagcgttcagcaaatcaaaggcattgaacttcggtttcgcggggcgcggggcttcgtcttcgcttgactcatcttgctgatcggattctcgctgctgttcttgttcacgcagcttctgcagttttcggattgctcgtgatgacatcctacacaccgaggcaaagcccttggaagtatgaaatagaagctgcctgcgaaagtaaagaaagcgagaaaagcgcgccgaaagaaacccgcggggaatgacgacagagactaatacggactagctccctttggataacatttacacgtgactttcatctgcggagacccagctccttgacaagcttgaaacctctctacatacattctcaaagccgttatttgccttgaaaaggcacataaatttatcagctgtcctattatcgctggaccaatgcgtcgggcgactgttcaggcctgccgtactgctcggcttgcaccagtatggaacattgccgctaaacggccgtgccctttgactttcaaccacctgcgaggtattcggccatatactggcagcagacgctcatcacacactccagtagcttctcaattatctatgcatcgccgcaaactctccctcgctgttatctcgaccgtcgttgcctctggggcatggtatacttatcagggcgacaccgttaaatcggcagcgacccagatccgggatttcgcatcgagtgccctcaactccgcctacgcagaaggaccggctgagaccacacggcgtgcattgctggtcagcggcgatcaattttacaccacgacgctctccaaagaccaacctctcgccaagcatacagacgattcagaccgccaagtcctcgagatgttgactcccgagcaagcgacccagaagcttcgtaagaacgaggagtcatatttggtcaatcggggcaagggtgttgttcgttacgatgttgttcaggttcccagcaactcccccattgaggacgaccatgcggagaagatagtggagatcccagcatccgtggctgctgtcagcaacggcgagccaagcagtgactggatgttctggggtgttttcgacggtcactcgtacgctagctcaaggttgaatacttatgatatagatactaactataagtcaggggctggaccacatctgcgaaattgcgcaatgtcttgatctcatatgtggcccgtgaattgaacacaacttacaaggctgcttctgctgatccatctctcctcgtgccaacatccgaggctatcgatgctgccatcaagaaaggcttcgtccgcctcgacaatgacatcgtacatgagagtttcaaggaagtcatgaaatctaaatcgcgacgggtcgccgccgagctccttgctcctgctctctcaggatcatgtgctcttctcagtttctatgactcccagtccaaagacctcagggttgctgttaccggagactctcgagcagttctgggccgtcgcggccctagcgggaaatggaccgctactgctctttccgaggaccagactggtggtaccccatctgaaatcaaacgtttgcgcgaggagcaccccggcgaaccatatgtcacgaagaatggccgaatcctgggccagctcgaacccagccgtgcattcggtgacgctttctataagtggagccgggatgtccaagatacgataaaagcgaagttctttgggcgcactcctcatccaatgctgaagacgcccccctatgtcactgccgagcctatcattactaccaccaaaatcgatccttccaagggcgactttgtcgtcatggctaccgatggtctgtgggagatgctgagcaatgaagaagttgtcggcctggttggtcaatgggttgagcaacaacaatctgctgctgcaagcacgggcagcaaggcttggttacagagctggttcaggttcgatagtcagaagacactgcccgtagaagctgcatccgacgcatcgagcgagggccagcggcgtcccatccgtcagcagcaatatgatatctctggcgcggctactcgatttgttgttgaggacaagaacgcagcaacgcatcttgtgcgaaatgcaatgggcggaaaggacaaggatatggtgtgtgcgttgctaacgctacccagtccttactctcgccgataccggtaaggatatctattcttttgaagtttattttttgagcatttggctaacatttcttagtgacgatgttactgtcgaggtcatcttctttggtcagggccctgattcgcgtactgtggaagtcaaccaggaagcgagtgcctcggaacagcctcccaagtcaaagctttaggcattattttgtcttgttttatttgtgacatttccaaagcattttgaagggtggctcttatacgtcttgcaatttcctagagaatacatagttttgtcaattttacgaattatttgcaatctctagattatttatataaagtcggctgtgtatttgatgccttggaccgcataagcccaatatgtatcctagtcctagctatattgtattattgtagctaattgttatttttctacctataacatagcgaaagaaaattatatgagattaccgaagtcgtacgtcggtaagaacagaggccgcatacgcggccgactattattatgagaagtaaaaggtattgtacatgctcgaaaacaggtgggcaaggagaattatgcacaaatgaacctcgaaaccagtcgacgaactatgtgcatcctagagcaggggcggtttatgaatgtcgacgcgcaaccccaagcggtgtcctgttgcgacccgaatgtggcctccatcttaataaaactctggaattcatttagatcagcgcgtgggtagctcgcgaccctgtaatggtgcatcgctgaacgaaccatcatcgattcaaggtaaagaacccatgtcattccaaatgattcgattctcgcaattgatatcagcgcaagtttttcaactggaaaggatcattatcgcccggcctctcgaaaacaatggcttgctttttgtatacgccaatctctaccggtgaaaacaccttattgtcaagtacccaggtttgcagcgtggcaaaattggtactggtgatccagtagagcataagtgcagttggtaactcttgaacaaagctcgcaaatccaatatagcatgtcaagactatgacaaaggaccgcaaaccggtgaaagagagctgcttgtacatctcgttctttgggaggaacgaaatcgtcttccaaggcttgactttccatcccagcagaacgttccccaatatcgacgcagtcagacaaaatggcagcacgcctgtggggtcaccggccagcaagtccgggaaccagagggcaccctcgttcgcaagagtgggctcgatggttaaatgcaaagattgggctgcggaggcagggtcttgcgactcgatgaacgacgatagccaggcaatgataccacgattgttaccgctcatcccacgcagactgtccataagcgcaataaagacaggtatctgcaggaaggcgattgctttgtgctttccggatactccccaacgcttatgaagctcagctgttcgtttccttatattgccatataattctttacccatttgagaacgtgttacatcgttgcgaggcacattggaaagctctctgttccttttgtctgcatatctcctcgcccaagcgcttataattggcgatattttcttttcgcgatggcgatggagtcgagtgtataacatgataggcaacccgacaaatgtacgaacaagtacagccgttaacggaatcgaggcagcccatggtagacatgaaacagaatggacgccgtgaataaatgcggtagagccgtcaagtgcaaggtcgacgatggatgaggttggtcttgttgggtggaagtgtcgaacttgcgagcgaggcaattgtatagctcgccgcattaggtgcagagcctgtgatgagcagagggcatgcatcactgctagcggggtgagagatgaaataaaaataaaataaaaaatggctaaaaaaaggtgaggctataagaattgcggaccggcaatcggatatttggagatcatcatgtgacacgtgattacttcattggcccgatcaagttgttgacagcaagagagggggagcattatctgacttgttctctagtttgacctcaaattctcttactatgtgtgatttctgatgaggtctctttaaatattgccttttcaccatggccctcttatcaaacgtcattctggccattctggtcctcaccgccacggctatcctgcttccgaagctaacaggcgttctcctcggtctagtgtttcggggagtgggctggctgatatggcgacgaacgcggtctcgccgtgagtatgtgatcgcgcgggcgcgatctgaagaggaggagttacgcgcctcacggccgaagggttcaacaacttcagtatcgcggaacggtggcgaagatgaggactgggagaaggtggatagctcaggcccaggcggggtacagactacaactggtagtgaaagcagtggtggtactggtgaggaaagcaaccagagtccagaggactgggatgggattattgggttcttccacccattctggtatggcattctctacacacgccaaaacacacaacgctgaccaggtgctacagcaatgccggcggaggtggcgaacgagttctatgggaagcaatacgtgcaacacagaaacgctggccgaaggcaatctgtgctatctacacgggtgaccatgaagtcaataaagccacgatgctggagaaggtggagaacaggttcaacattcacctacatgctccgaccgtggtgcttctatacttgacgacccgcaagtatgttgtcagtagctcatatccttacatgacgctgcttggacaatcgctggggtcactggttgttgcctacgatgcctttacgctgcttgtaccggatgtttttgttgacaccatgggctatgcattcacactcgctctgtgcaaatggcttttcccgacagtgcctgttggcgcttacgttcattaccctaccatatcaaccgacatgctcgcctctctcgacgacaagagcggggtgcaagggatcaactccggtgcagggaaagggtggaaagggaaagtcaagcgtcgatactgggagatatttgccaagctatatggctgggtcggtcgacagatcgatgtagttatgtgcaactcatcctggacggcagcacacattcgcaagctctggggcaccggcaagaaaaccagcaatagcagcggcgatgggacagcgtcatcgccggcggtggtgttccccccaacagcagtcaccgaactggaatcaaatatcgccgttgacgcggagagcgagaaaactcgccagcccgttctactttacatcgcccaattccggccagagaagaatcacccgctagtattgcgctcctttgcgcgattcttacaggaacgaacaaacaacccagcatatgaaggccaaccccctccacatcttgtgctcattgggtcggtgcgccattccagccctgatgaaacccacatctacaacctgcgccttctagcgcatgaacttcgcatccgcgaccatactacattcttgtgcgacgccagctggcctgtcatgctgtcacatcttcgtaccgcctcagttggtgtcaatgccatgtggaacgagcatttcggtatttgtgtcgtcgagtaccaagccgccggtctcatctgcgtgacacacgactcgggcggtccacgtgaagacattgtcgttgatttgggtgatggtgcaactggattccgagctgaaacagaagagcagtttgctgcttctttcgaggccgcccttgctcttccggaggcagagaaacttgccatgcggcagcgggcccgtcgctcagctcaacggtttaccgaagaagagttctcccgcaagtggctggatcaagtagaaaagcttgttaaggcatcgaaagtttagctttgtgatatccccctcgaaaatagacgaatggcatttccatttactttagtagttcgctgaaacaagaagtcaattctatgacaacaacccttaaggactgtacttaattcataataatcgtaaaatagaaatagaagatgcggtcaagtctaagactcgtgtataaaaacagacatcgcgactagagaatctcaagtcttctaaccagaaacagataatgtctgcaatacaactgatgacaatgcgaacaccctgaacttgcccctttaatcgctatcactggccgcaccatccgagtcagtcccattcccggtattttgaataccttcagccatgatatactcggtttgctgaaggatcttcttaatctcgttattgttgaagaccagctgagcaggtttctgaccatgcttattccgcacccgagggtcacagccagcctcacacatcatcttgatcatagcctcgccgagttctgcgtctttatcgttggcgtaccgcactgcgatgtgcaacggcgtgtcattgtccagccgggtcaacgggtcgcattcgaagtattggatgtcaaatagtgcgtccatggtatcatctgaccaaaaaaaggagttagcttgcatgaaagatatgaagtgggaaggtaaacacgtacagctgccgtattgggcacagatgtgcaatgcgtggtttcccatagagtctgtcaactcgttgaagaattgtgccacttgctcatttgtcttgtcttccatatcgttcagcacttgctcaattaggtggggttggtcccggcggcaggcctccacgaccagctcgcggggtgatgcgccctaaatcatagcggcattagcgttgacagtgagcaaagattacgtagtattcacctcgtcagccatttttgtatacgggtccacagagtccggaatacccgagagtgaagtcggtagtacagaaattggtgctcagctgttatggggcgcgtggagctagttgtaacaataatccggcgttttgtatgggtatattgctgaccagaatgaatcttccacggggaaacgaagtggaatatgtatgtacaagctggattgccggttaaaaaagcattcaaattcctggtaaatactacaggttgtcggagttgttccccattccacacgcgggccgccccggatatataatcgtccgaatccggtccggatttagccgcgcgcctatatctctcattatcgacggcgatatctgcacctgacgggaactacattgtatagctgctgagaacctacctttctcctggtctagctgtctggctctttcttagccttacccaccgtatccgccagatcaccaagatgctcgtctgtatgtgctatctcctagttcacgctgtccagcgacagccagaacagaaactgattcctctccctagtctgtcccaactgcagcaatgcgctcactatttctaaagcggaatcgagcacaagattcccagcgggtgtgaaccgctttgaatgccgcgtctgcccctacgaggcaccgctagagaagaactatttcgagaagaaagacatgaaacaaaaggaagtggacgacgtatttggtggcaaggaagagtttgccaatgctgacagtgttggcagtaagttatctctgctatcttctctcagaagtgacatgtccgtcgagtatacagggctgacatactcttttttttccttatagctcaatgccccgctgaaagctgcaacggggaacgtgcgtacttcttccaactgcagattcgcagtgcagatgaaccgatgactacattcttgaaggtatgtctccctccttacatccaacgtgaggtacccgtgtctgacagctccagtgcacgtcgtgtggtgctcggtggagagaaaattagagttgggcgacaaggctgggaacaagtcacatctttcatttttggattttactacagcgaggtgcaactggcgcatttaccaggtgtttattggggcatatatgactcaaaactatcatgttgatacaaaagatacccaaattgatcaacactgaacattactattttgcgatcagcggactcaaaatttaactttttatgcatttttattttgtaccataacttattgtagctttggctttttctgtgcttcgccactataaaaatattaccgacttagtacggatgtagagcccgacattggttctgcctgggatttgctacagagaaatcggatcaccagacgccaaaaaacaaataaaattctatgcatgacattgttggtgggattatttggcggtgagcatgttgcccctcacctgcggggttctgaaaacacaaagagagaaaaaaagagaaaagaatggaacgagtcatccaatatcgccacaggaattcgtacggtgccagagaaagcgggaaataggtacagtaaacaatgcaacctagaaggttctcacccaaccactctgcgttgctgcccagttcaggcgtttagagccacagagtgggctgggacggagccgaagaaaaaaaaaagttttcacaccgagtggagtgccgtggcaggagaaaaccagagaaagggagggtgtttcaagcgcagggtagacagtacatggttcagtatgggagagtccgtattagggcaggtacatgtacctcaacccaccaacccactttgcaaaatctgcgtacacgggtaagggctagaaccaatcacaagccctaaccaaaagagggcttggccccacctgctgactcgcctcgctcgcttgcccctccatataaggatttcccctcctcccctctcccacagatttttcttcttcctctcgtctgctacagtgagtttttcctgcccccctactgcttttaagccgtctcgctccctcttccaactactcttactgattacttttgctcagtacctctacgcgttctgccgtagtctctgagcaagtttttccacagattttttctagtatcttacaaagaactacaaaaagttccaaccgtcatcatggggtatgtgaccatcactcactcgtttcattctcatcagaacagacactgactcagtcccaacagtaaggaagagcgcaaccacatcaacattgtcgttatcggccacgtcgattccggcaagtctaccaccactggtcacatgatctacaagtgtggtggtattgaccagcgtaccatcgagaagttcgagaaggaggctgctgagctcggaaagggttccttcaagtacgcctgggttcttgacaaactcaaggctgagcgtgagcgtggtatcaccatcgatatcgctctctggaagttccagaccgccaagtacgaggtcaccgtcatcggtaagagacactgtcccatccattcagtcagttgcacacattctaatacattcttacagatgcccccggtcaccgtgatttcatcaagaacatgatcactggtacctcccaggccgattgcgctattctcatcatcgcctccggcactggtgagttcgaggctggtatctccaaggatggccagacccgtgagcacgctctgctcgctttcaccctcggtgtcaagcagctcatcgttgccctcaacaagatggacacctgcaagtggtccgaggagcgttacaacgagattgtcaaggagacctccaacttcatcaagaaggtcggctacaaccccaagtccgttcccttcgtccccatctccggcttcaacggcgacaacatgctcgagccctccaccaactgcccctggtacaagggttgggagaaggagaccaaggctggcaagtccaccggaaagaccctcatcgaggccatcgatgccatcgagaaccccgtccgtccctccaacaagcccctccgtcttcccctccaggatgtgtacaagatctccggtattggcacagttcccgtcggtcgtgtcgagactggtatcatcactcccggcatgatcgtcaccttcgcccccgccaacgtcaccactgaagtcaagtccgttgagatgcaccaccagcagctcaagcagggtaaccccggtgacaacgttggtttcaacgtcaagaacgtctccgtcaaggaggttcgccgtggtaacgtcgcttccgactccaagaacgaccccgctgccgcctgtgactccttcaacgctcaggtcattgtcctgaaccaccccggtcaggtcggcgctggatacgccccagtcctcgattgccacactgcccacattgcttgcaagttcgctgagctcctcgagaagatcgatcgccgtaccggtaaggccaccgagacctcccccaagttcatcaagtccggtgatgccgctatcgtcaagatggttccctccaagcccatgtgtgttgaggccttcaccgactacccccctctcggtcgtttcgccgtccgtgacatgcgccagaccgttgccgtcggtgtcatcaagtccgtcgagaagaacgccggtggtgctggcaaggtcaccaaggccgctgccaaggctggcaagaaataaattattctcggatgatgctcattatgccgtgatgattttttcttttcaaaaacaattactggatcgaggtagatttgctgtgtagtagaaatgactaccacatttttatgacaaattcttttccttgtagacttgtaatattattaaagtagctgccgttagacgttgtatatttttgtctcagcctatagatcgcgggatggcctgaagctaatcttggcgtgacgcctgattgacagtacacctatagaccatgtaccttctgtcaagactgtataatatttgcttcaatccctctctttctttctgctataccgataacattaactatcagacttgaacttcttattccaatcttttgtaacccgattgaatgagagggcatcacgatcctatgatcctcaaatcggcttcatatcaagcgatatcaagtaaggaatagcaccatgttcaatctggggcccaaatacatatcagttccatcctagttcgatgtaaaagcccgttctagacttatttctgtaggatcgaccccgatcgatcgccacgagacatggaaacatatatattttgtcatttgtgtacatctcatagttcatgtgtatgcgtatatagtctaacggagagaagctcctaccaatgaataccgatttatatcatgatcattaaagtgttaccatccaaaatctgtaaatcatactataatcatatagccaagttctccctcgatgagtacatgatgctctctagtatcaggtgtgaagatgaagaatatgctcgaagaaagaatttgcctacacatagtaatgaccttcaaaaattaaaaacacaaatattcttgggtatcaagttgcagatacctacatgtagtatgtatccaatgttatcacggcgtgccaatcgtagacatatcaatcactcttcctcatactcttcctcatcagaatcctcctcttcctgagcaggagcacgcctcgaagaccgtctaggcccagagcttcgcggcgtctcacgttcctccccgtccccgttcacatcgctcgcatcatccgccccattagcttgtatggtcgccggctcaatcccaagactcctcccgagcttcccctcaaagtcttccaggtcctccctctggaattcagtcaagttctcgtggggacccctgtttttcccatacacagttcgcacaagacccgccacaccactagtcccaacctcaactttaccccgaggaccaagaatatactcaatcacctcctcgccgccatccatctcccgcgtcttgataatgtatccctccttgcatagccgctgcagtagtttatccgtgcggtcgaccggcgtagcaatctcggcgttagtgcgcgtcaggtaccggtcaagtttctgctcagccagcgaaccgccgttcagcagaatcaccgcaataatgaaactgtacaggccggtgtatgtgctttcggtgtagagggagggtgccttggtcgggatgaggatatcgggggaacgatatgcgagcggcagtgtgctagtaacgatccaggacttgttacccgaagaaggcttttcaattttctgcgcggctgtagtacaggaatgccatgccatgtcagtagtgaatactcagaaatagcatgagtctgcaacaaagaaaagcaagacatggaatccaactcaccccgtcgctggctgatggtgaccttctctcgcgccggtaactcgctcatctccataccaaagcgctgtctcatttcccgctgcgcctggtcgaaaactagcttgaattgtcgcgagccgtgctcgcccagcaccttggcgctgatatcgttgcgccggatcgggagccgcgaatactcgctggctagggcgagccgcaccaacttcttgaccattgcgtcggtgctggtcggtgcgctcggttcgtcatcgtcgctggatgctgcgggcgatgaggcgggttcttcggtttgtcttctgcgacgagcgcttggggttacctcggtctcgggtgcttcgttggtctagggaaggcggttagttggtggataaaccaagggttgtgtttgcatacgcgtcttttgcgattcgatgacattttgattatgtaggtgtgataaattgcaggtgggtttggagagacgcgacgcgatagactgattttaccccattggggttggtctgtgcgtagcccttatcgatggttctttgtttcagcagatgggcttcgatgtcagtttctttattttaggttccttcgaggattgtatttggtaatttactgaagaaagacatcattttcgacgtctacgtatatggagagttatatgacgaaatccaatgaattagcgtcgaggtataattacgtcgatactgggaacgtgaactaaatacaacgtgggcaaggcaacacagagcagcgatgaggtattatgttctctaaaagaaaaggaaaaaaaaaaaacaaacaaagaaaacgaacgctccaaaggtcaaagagatctaaaatcagtggttgtacttttcattgacaacctccttcgtctcctccttcttactctggaggaaagtgctaacccaagccagggattcctgcgacagaaccaagctggtagtaacaaccgccttgcccgaagcaaagacaccatcaccaccacactttttgtactccgagccatacacatcgaagacatggtgcttgacatcgccggcgacgcggacaggcagcgaggcactgttgtagatggaaccgcgcagcttctgggtgtcctccttgaagatcgggaagcgggtatcgatcttggtcagacccttgtcaccgagggagtcggcgcgggctatgtagggagcgacatagctgtatggggtggagaagtagggtagaacgggtttggcgagacgggtgtagccctggtcagcgaattcgagggacttggctccgtagggattgcccttgtagtaggagatagagtcggagatgatgggataagaagtcagatgctagattggagatgttaggatcattctcgttaggctgtagtggggtacatacgtcaaggaactgagagtagtgcttctcgccgttgacgaccggttcacccatttttacttctgcgtggggcataaagattgtaagttgagaaggatatagtataagaatacagaagagaagagagagggagagagggagaggaataaattgggttgtatagaggaaaaaaagggttttcacatgtgattgcgctgtcattatgcaatgggtcctaccgcaatcgcatcatttgccatacatcgtattctcgggttatttcagtcctctacttgggattattcttcttctttgctatgttcttttgctatattcttttttccatcttttttacgaagacaagggttcaatggccgattctaagtgatcccacgccaatccattgactttggacatgcactgaaaccgtccgagcaattgcatggctaattatagttgacgtatcccaaatatacttgtttcgattgccaaaatcctgaaaaatcccaatcgatggattcttgataaggtgctttcgcatgtgattgcgggtctgtgaaaggtggttccacttgggtgtctatcaatgatctgttctatctctcttccacggtcaattcctaccttcccaggtgcttcccagggtttgatattccccagaatttatccattgaactcaaatgaggggagacctcgcaagataaaccttgttttcgtccgttccaccgtttttcgttggacgagactgcttatctgcataagaaaaccgcctagacggtgacagatggccgcagatcggggctagtttgccagcatatggctgatgcttcggcttctaagttatatgagtctagcccacctgcacgtacattggtgatgctagtcatgtccccacctattggcctgaccgtcggcccctcgaaccgcttctactctcgggaatacgtaacagcctccggtccaaatgtactccgtagggggagtaagattgcgcaaggtcctagccggattggagatcgttctgccgaccccgggcatgggacgggcgaagtgattcgcagggtcatccgaatctcggcgcttgatgtgactctatggaacggttgcgttcgataggcatacactactatggccatactatatttattggtccaggcggtttatctgagcgatagaaggtaccttggcacttcgtacatattacctggtgttcccaatgcggctaacggaatgcggaatgttatgtattcggtacgactatcagggtaagccgagaaggtggccaggctttccattgtggtcggcacatgaaaaactgatgtcgacacagatagttatgccatggacatcgaaattctaagccggagaggcgatgttttttttttgccccccctccttttttttcttcttttcttctttctcttttgctcgggactacgccgatcgactagcaacccactcgattacgattaagctactgtgcagatccctgtataccgtgggtcttgaccagcaacggttgtcttgacatctacaaagtacaaactctgccctttctgttcacgtaccctttacccagaataccgcccaaaaaaatacatcttatcattgcttttggagcctttggaatattgtgtagtcgaaaatccccatttaaactgtggcaaagcacgccactcccctacttctcatgtacaattgggtctaaaatggagtggcgattggcatgaagatgcttacatatggacatctagcgtcgcggaggcccgtgatccgttgttagcgaatgtatcaatttcacatgtcaaactgaggcgtcgtttagcgttggcgctctcgatgtcaaggattcaattgtgttgccttgtaaatcaattggtcgactgaggtgattatcacatgaaatcaggcgaacacggcttattttttcaggcgttttatctgtcaaatattctcgaagcgctttgcccttggcttggcagttgttgttgcattactacgtcaacatgtgtgccaagggaatcagctgtcggacatgatgccgcgcatgaggggatgtattttgtggtcgctttgttgtgtacggactagactccacctgaaaggaactccgggtttcacatattcttggtatcgtatgatttactatgttgtactatgttggagtcaatcggctattgcacccgacagctatgcactctcatgcaggctctcattctatattcccaccctcatgatagtatcagtgtatatcagtatttactttggtcaacctttactccttgaaatgtatggtatttttgagaaatactagcgtagcagactgtatgtgaattatattcgtggtgggggaaaatatcagaaatatatatgtagtactccatatactaggccggaaaaaaaaggagacctggtcaatacctaccaggtactccatactatgttaaagaaactgatcatctcgcatgcgttgcggcaagtccttactagctgaggtagagcgtgatcggctgcgactaggtgaagggatactatctcgctgcgctttagagaggcatctgcaatctaatggagcgggatcattgcgcgcacgattccagcgaagatacgaaacatcatcacgactgacaactccagggtggtcatttgatagagacatattccaaggatggacagaatcctccccggcaggagtgtgcaagggtgctttaagaacaacctcaaagggaccaacggcgagcgagtcttgctggagaatcaacttccaaagatgccaaaagctggtatcaatcatgtgttggcccgtatttgcactgagccgccaataacacgggaatttgttagtcttgattctcacctctgcaacctggaagggcgggagcggaacctcgtggaggaatctctcaggtagatcggctatgcccatgaactcgctctggatccgtatccactgctcctggtattgttcttcgaaaaactccgtccactgtgggtttacgccgctgtcagctaaccccgcggacatctcccagatgaaatattcggcgttgacccacttgtcaatactgaacgatgttttcagaagggaagtagtgtcgcggcacacgttacagtgcatcaggatatgaggcgtggcccgcacggctaccatgggcatgttgtagtgtcgatggacctcgttgtccaaccatttctccctagcgtgctcgcggatgggtttgagaggaatggccatggttagaactagatgactggcgatctattgacttgcagcttggtatggaccctactaggtgttcgagtacttgattgaaataagagatcagtggtctatataaatactatgtctggattgaatgaaatatcctattctgggcccgtggagactaagataaaagaagacaatgaagataaaagaatgcgtttctcttattcgaagattgaaccgaaaatatcgttcaaagaccattgtccccttgtttactgtttactagagatcaaaatggttcagttgttcactggaacttggaatcaaagcgactctttgtttggaatagatgaaaatactcgagcgctgtcaaaactgaaatgccagtgggtaccagcacaagcatgcatgctatatgctagaaataagttcaagattgaatcctgctagtgttgaatactcaagcgctgatgcccatatcgctgaggtatgatatgtcttggcgggggtggggttcacatgtggtatgcatatagactgtggaggaagacaatctataattgtatccgcgagcatggacatgaggacctagacctttgggggcttcctcgacatcctcgtcgtgatcgggaatctagagtcttctttggaactagacgagaggcctatgtaagtaattgcttttcgaaaactacgattgcacgttacggatagacatggttacatcgatcgtagcaatgaaaccatgagattgaatgccctgagacaaaccacatagctacagggtcatccaggcgtgggaatgatctgtgttaggaggacagaccaaaatccttcccggcctatgcgaaagaggaagatgtcgaccagttttcaggtaatagacaacattgattttgaaataattgttcattttccatttcattcagacggacaccaggtatggaagtggcgcccccgttaaaactggagttcatcgatacattcacgaatctgtttccagctatggcgtatgttttcccatcccatgctcgcagggaccgaatgttctcgatggcttttcgacctcgccttcacctagaccagtgcgctcaaaacgacaaaacgcccaaggaaaccgtttagaaacctgtttcggagaattagtgcaagttccaatatgcatatatgtatatcccgggccaaacatacgcagggcagtgaagaaccaacggttctttccgctggtgtaacggtcctcaagagccttcttgatggtcttcttggcgtcctcgcgctgggagacctccttgaaggtgtcgttggtgatggtacccttaagaccctcaagctcgagagtgtaacgggtgggcatcaagtggttgtagttgatgaccttgatgaaaggcttgatgcggctgcggcggtcgacaagcttcttgcccataccacgggtcaccttgagggggtaacgctcgataccggcaacaatggcgtaggagaaggggtgcgacttggagccagcatcaacgggctggacaatgacgacctataaactcgaacaaaaatgcctgattagcactccgaattttttttcttgtcgcgcagttcctccatagtgcattgtgctctttcaaatctcgagtctttcgcttgcaggtcgttcgcctctttctattctcgtgctcaatttcggggaggatcaggatcttgtcgtaccttcttaccggcgtagcggccacgggtgatgatggccacacggcccactttcatgactgtaacatatctgtcagcatataaatcgtaaggggaatcgaatggtgaagacgtacacttcattttgtgaaggtcccgggggcggcgaggatggctggttgtcgagatacggaacggtcaagatcaaagtattcgtttttgcggatgtgaggtagagggtttcagggcacagtagcgatttgtgtgttgtggattgattggttgacttaccgacagatggcgactagcctgtttggggatagtttccccattgagccccggggccggaggagatgatgacataatctgcatgttgtgcccagccttgacggtgtagggcaggtgcggcccagtcctgctcaccgcctgccttgattcccgctgactcaggttgtgtttacatgacgatcgcagttgccccggttgctagggccgtgagtgatgtatacaagactgcgtagctcctctttctcctcatccccacttgctttccacttatcaagctgatctcccggtaattttctctcctccaccgagctctgagattgttagctttgttttgttcttccagcgtttcctccttgacgaccttgtttttactttgaacgcattctacacataccctacatacattccatccatattgtcaatacctctctgagacatctggataatccactcacgaagacatcatggtgtccccagagaaggataccccccgtgaccgggaattggtccggcattcactgacatactccgagtccaaagttccaatgtaggtttcgcaactaacgccttctgattcttgtttcgcgaaacccatgggtgatttcaaacaaatgctaaaacgcggtctacgcaggtgggacagttcggatcccgagcgtgcgcctccaccgctaccaatgaatcctcgttcgatgagtccgatgagccctgcgacgaggtccaatgtttctcccaacattcaagcagtggccgcaaaatttacagagagacctagcgataatgcaccgagctcctacacaacaaatcctatgccactcaagtcttcctcgccagagaggtcgttggtcaaaggccagcacaagcgcatgcagtcactacagcctgaagatacccgacaagatgcgcgcagcgactttctgaattaccttgacaacagatccccagagcgtcctcttcgtgcgacgattattgatgggaccaagccgcgcgaccctaccaagtcaaccagttcgccagtgctccgtcaagatgtggaccgcgagatgaaatactccgtttcgagtcggtacttatccaagccaatattgggagagagtactccaacctcagctacaatgttggctctgcaaaatatgcagctacctctagaacccgaccctccatcaccttccaaaccgccaaaaatgatcgctgggccatttgagccacaagcttattccacaaagaatgcaagcatggacaccctctcaaatcaaatccacagtctcacggacattgcaagcagtctgcagcgtgagatgatgaatttgagccgacgcagcaaagacaatgccaccgacctggttagcctcaaggcggcaaccaacgcacgcgatgaagacattcgcaagagtctgaaggatctgtcctctcatcttacaaacaagtacctggacgctgaggctacaaggtttgaattcagcaatcttttcaagggtggtgatgggcctaacgccaagggttcggatagtccagtttcgaagaggagctactccgtgcctcgcatgcctagccctaatccattcgcatttgatcgggagtcttgcgtctcacctgctccgatttccgacggttccgcagcccttgctttgctcgaaaaggtattgcgcgagatggcaactaaggaaggtgaggaaaggatcttagaggtcgttgaagaaatcaaatctcgaccagcaactagcgcttcggataaagattccgataacaaggtcactgctatgctcgaggagatcctcaatctcgtcaaagaggatcctgcaagcaaagccctcgtgcgatcttaccgtaggggcgccaataccgataatatccaatctgggaatgcctcctccgagccgagacgatctgggtcgatgggatccgtgcaccctgaaactgtacgtgcactagacctttctaactctgagaaggagggcagctcttcacccaataatccggaagaagttctggcaattcttaggagtgtcaagaatagcgtcatcgaaggaggtggaatgaccaacggcgtgaagtcgttggtacgtgagctacgaggtgaggttctgggcatgggtcgagaacttgctcgccgattagacgagatcgagagttcccgttccaacgatgagtccgaggagcagcctagagccgctggcccagaggaagtttccgccattgtcaaccgcagcctggacgacctcaaagagcagctggctgctactatcaatgagagtcggcagcagtcgtccgacttgtccgaattcagatcaaccatgaacagtgccgcaatctactctgttgtgaaaaaagcactcgatgaatttgaactacctcaaccccaagcccattcgcgaggtgctggaatggacagagaagatatcctcgagactgtccgtgaagcctgggagacctacaagcccgaaatcgagttcaacaactttggcttggaacgagacgagatcctcacatgccttgaagaaggtctcaagtcttaccagccccaaaatgaacagacggtcacctacgatcagattctcgcagccgttgaggacggcatgcagaagttcattcctccacaaatcgagcatcagccaagcatctctcgggatgagatcatcttgaccatccgcgaatgcttggagaagcagcccgagtctgcctctagatctcttgacgaggaacacgtcggcgatcttcactcgatccgcgacgagattctcgatgcggtcactgggacaatggcaacgaacaacatgcagcccaagtctttggacgaggaccatgtcaatcacctccactctgttcgcgatgagatcattgaagccattactgaggtagtgacaagccatgccgcaggtcccaaatctgtggacgacgatcacgtcagtcatctgacttctatccgtgacgaaatacttcaagcagtcgtcggggcaatggctacgaatagcacaggctccaaggagttggacgaaggtcatgtccatcacatgtactccattcgggatgagattctgcaagcaattaatggaatgatggacatcagcagcacagggcctaagacgttggatgaggaccatgtcaatcacctctactccatccgcgatgatatcattgaagctgtcactggggcaatgggtaaccacagcacctccaggcctttggatgaagacaatgtcagtcaactaaattctatccgggacgaaattctcagcgcattggccggctctatgacacaaagcacactgagcaaggactcatacgactctggccttggccgcgacgagattgtccatgccgtttctgatggcctcgaagcccatttcactgcggctcgagagatggatgagccacgcatttcccgccatgatgttatgaatgcggtcaatgaagccttcgatgctcaacaatcagctcttgctactgctcacacgaacatctctcgtgatgaaattttgaatgccattgccgagggcattgaaagttcaatgaacgctcagaaatcagcactcagtacgccctctcgtgaagagattttcagcgccatcgtggatgccatcgaacactcacgttcttccctcaccaacgacggggagcctagtatttctcgagacgagatcctgggtgccatcttggaaggcatggagcacttgtcaaaagaaccgaatatctccagggatgagatcatgaacgccattgctgatggcattcagaactcgagtaactctgtttcacgtgctcttacactgcctaagcaagacagtgacgatcagcagtccactctttcccgggaggaaattattaatgcgattctcgaaggtattgagcagtcccaggcttcgctcggcgtgaatggtcagcctagcgtttccaaggaggaaattatgagtgctatcgctgagggtattgaagcctcggcaagcagccagcagtcagcgctcagcaccaacgtccaagagccctccatctcacgcgaggaaattttggctgccatttcagaaggcattgacaatggcaattccatcacccgggagattgagctcaaccaggacgacctcatggaggcaatcacctccggtctcaacgaggctatcagtaccgcaaataccaacgttggggaggagatgacagaacgcctccaatctttattcgaaggcatgaaagaggaattcaagcaatactcggccgccggtggaagagataccgagcaagtcctcgacgccatcaaggatggcctcgatatcgttcgcaaggagatcgaaacttacgtggttactgcggccgatctatccggcaaggaagaagtaattgacacggtgaaagaggggttccgacttctccacgctgatatggaaaagaccattacagattcaacacttatgaatgccccgcgaggcattccggatacacctgagcttctggatgccatggaaaaagagttcgagcacctacggggaaccatcaccactctactcctacgcaataatgccactgaagacaaagatgagatcttggacgctattcgagaggcagctgatcgccacaagaatgaccccggcgatgatgttgtcaatacgatcaaacatgaattcgagagtctccgtgagcgcatggagatgagtgtggttcgtgccgaacctggtgctgagaaagacgagatcatatccgcactccgtgaacaattcgacaccctgcgcgaggagacgtcgcgtacagacggcaacgaaaccacgatgtcctcgacaagtgagctcctcgaggtattcggagatagtgttgactcaatccgtaacgacctgaagaaaatattggagaagccaactgagttcgacagctccgagattctcgataccatcaaacatggtctcgcagatctgaagcttgaaatggatactctccgtgattccaacaaagaactggatgatgccagtaccgcccgcggcggtgaactcatcctggcaaacgagcccagcattggacctgacattgacggtctgaaagtgcttatcaccgagcttcatgacaagatcgaggccattgaaactactcctcatgccgcagaagcttccgaggatactctcaagcgctcacaccttgatgaagtccttcttgcgattaacgaagttcagcttgccgtgggtgagatgagtactcaaaaaagcgacgagaacaatcagacggctcgaaagaaggacattgagattctcgagcagttactcttgagtgcgaagacccagatcgatgaacttgttttcccttcaccggaccaggtcgctactcctgagcacattggagccctggagaccatgatccgagaggcaaaagaatcgattgcccagttttctagtcgcgtcgaagccgagactcccacaaagtctgaaatcggcattttggagagtctcatcaaagatgtctgggttatcctagatgagatgaagagcaaaactaaagatggagattccgataaattacttaaaactgatatcgaaacggtggaagcaatgatcttcgaggtcaagactcaaatcgaggagcttaagcttcctgatgtgaatactcttccaaccaagacggagatccaggagctctcgacacttgtctgcgatttccgagagacgatggaggccaataacgaattgacagcccaagggttcgatgctcgcaaggttgagcacggtggtcttgccgagaaaatcgatgaagccaagtttgtcgtcagcgagctcggggacgaactcaaaagcaagcttgatggcagcaccgaaggcctgaccgagcttaaacagctcctcgaaggactagccatcaccgcagagagcttcaccaccgtcgaaaacatgaaggagctcaccgacttgatcaaccgagaattcgaacgttctcggggcgatgaagatgcagtcaaggccgaaaaggaggagcgggatgctgctacaatagtcaaacacgatgagacgcgggccgccatcattgtggagcttggcacaaagattgacgagaaaatttccgaagtcttggcgaagtatgaagatgcgcatacgtccctccagtcgaagttctcagaaaccgaacagagagatctggcacacaccgaatctttgacaagtacgagaagccttgccgaggacatcaagcttgtcatcggtgctatgggcgatagtgttaatgatacctgtgagcggttaagtgtggacacgaaggctctcatggaacaagtcgatcagtcccgccagcaaatggagagcatgcacaacgatgtgagatcgcaccaggagcaatctcaagctgaaaacgaaagggctgcagctgccactgatcgagtggagagcaagctccttgaattccaccctcgtattctggaatctgtgcaggagatattgacaatcgtcagccagcactacgaccactcccagaaatcagcagaagacttcaagtctgaactgtccgcattgtcttcaagtatcccagcaatgctacctgcgctgcttccaccggaaccagaccgtacacttgccatagaagatactccgctacacagcaaactcgacgatattttggaacatgctaagaacgacaaagtccacgagattttgaacactctccttgatcactcgaagaatgaccaactccatgagaagcttgatcgtgctcttgatcaaggagcgggttcgaatgatcaaatatatgagagactcaatgagttgttagatcgtgccactaatgggagcggtcccgttcatgagaaactagacgcactgctcagccgtccctcgaatccgccggaatccgatcactctgctacccagatggcgaagctggatgagatgcacagggatatcatggaaaactctcgcagaatgaatgagatgttcgctgcccagtcagtgctggtcgctgaagataccgagcgaaagcgacgtgaagctgaggaggctgcgattgctcttgaacgaagagtttcgcagcgtgagcaggtggaagcggagctcgttggcttgcaggaagagaaggattctatgctgaacatgattcatcgcctaagagcagaaaaggaagacctgatcaagcaaaacaacaagcttagcaaggatctgtccggtcttgaaacggccctagagatacgccacgaagagatgcggcagatggaggaccgcgcggatggccttgagaaacgcatcctggagggtgtgctcgaccatgctcgtactattctcctcggccgatccaatggctcgcaagccatgaacctgaagaggaaccgcagcactcggagtacccgttcctcacgcacaggcgctcgcagtcctagtctggcgagcactgctagtactgccaaagagcccagtcgcagtctgcttggtaatggtgtcggaatggctttgaaaagaaccccgacttcgctccaggctggaaaagttgctgtgcagcccaacatcggaaaggaacgtcggattcttagcttaagtcatgtcactggaaaccgcggtgtggaccgacaggtgagtgctaaatctggcatcacgaatttgaagcgcagccactctgtcaaatcgaactctcttcgcaagacttcttgggctggtccaatttctgttgtcgacaaagagaacgagccattccacgaagaggacgagcaagccagcgaagcggaagatgctggtccacagcgcaagactagttatgtgcaaagtaacgcacctaccaaccggaagacgagctgcgcagaatctgaccttggcactgaaaccgagcatggctatgcaccgagcaacgctggcactgaccgtcgaacaagctacgcagcaagcaatgcaggcacggagcgcaagacaagctactctggcagcatcgtcgacagtgtagttacagatgcctcagatcaacgccgtgtcagcggaatgagctccacgaattcatacaacgtggcggagagctcaatcgccgagcacgaccacgaggactaccatgatgatatttctatcgatggctccgatgcgcaaacagcacgagaggacggagagcattctgggaatgaggaccagaatgaggatcacgaaatgtcccgccagatccagcaggctaatgaggctgcggaagccgaagctcttaagctgttggctccctctagtggcagcactgatgttgcagtttgattgatatgttttgttttggatggagttgggcgcttgcaccatgaatgttttctttctttctcatataccacttttgtttctgcgtttcagtgcttggatgatttggatgactttcgtttgtgaccataaaggtgtattgtttaatgatgattttcttttgtactcttccaatacacctgtgatgtagttcgattgtatagatgtatcatgtatgtggtcacttgttgacgggtattgttctggatcacaaaccatatttttagctgcttgaaatcttccttcgaacgactagtccttgtagacctaattttccttttttcatcatctgtcacctttgtacaagtcgacaaagcccgacccaacgaataaggcaggtgatcaggtgactcccaacaaatcattgctgcctgaggctatgccgaggccagcttcacctggtcatctctctactccattctcggatggagctacatatttctcccctattcatggttattgggctttcctttgtttccatttccatttccagtttttcttttcccttttccatttcttcctgatagacaggatagggtgccctctcaaccgcatatagatctacattccgacctccgaacctcaaggagctttcccccacatcgggtgatcacagctggttgaggggacatcccacgatgttggaccctttcccaccgcctccggaatggctgcggagctttgtagagccctataccctccggttgaactgcccgacacttgccgaccatatccacgaggttatcgcagcgtttgccttctacctgttcatccatacagttctctcaccccggctctcgccaatcctctttcctcagtcttacaacaagctcactcctcggacgaagctgaactgggatatccatgctgtctcttttgttcagagcattgtcattaacgttgccgccctgtgggtcatgttcttcgacaaggagcgcagctccatgacctccggtgagcgggtcttcgcgtatacaggtgcctgtggacttattcaggctttggccgtgggatacttcgtatatgacctgattgtcagcattgtgcatgtgcgcatgtttggccttggaatgcttttccacgctgtcagcgccttgtgggtgtttagtctaggctttgtaagttgcgtctccaatctgcctgatataggtacattcagtatcaagaagatcagcataaatgcgttttcattttttaaaatcgagaaacatctaacatagtttccgcagagaccattcctaaactacttcgctccgaccttcatcctctatgagctctccagcccattccttaatatccactggtttctcgacaaagtcaacatgaccggcagccgcgcccaatggtataacggcatggctttgctcttcagcttcttcgcctgccgcctcgtctggggcagctggcaaaccgtcattgtgtacatggacatgtggaatgcgcttcagcaaacctggtctgcagctgcagccccactctctgaacccgtgagcatcaacgcacatgtcttctacccagcccgcgatggtagattgtgtgtcaacgaagcctgcgcgcgcgccaatgccgagatcaccaagttcaaggagcataccgcgggaggtgtaccaacgtggctggtcgtgacctacgtcggatcgaacttgatcttgaacttcttgaacttctactggttttccaagatggtcgagactgttctcaagcgtttccgcactccggctgatgctgctggcatgaagaaggggacgaaagagcctgttagcgcagagaaggatgcgcagctcaaggaggatattgtgcatgatgttgtcctcgaggcggcttccaagctggagcagcaggagaccgctattttgcaggatgagctttcctcgttgcatgaaaagatctcttcaagtgtggactcaggtctcggggaggagttgcggaaacggagagcagagcttgtcgcgaagcttcctttgcctggtgcttgaggtttggatgggactttaggttgttatttataatctatgtgtctttgagtgctgtgaagtcttcttccctcttttgtccatgcttgctttatgattgattgagatgtttgtgactcctttctatgttgctttcccttgaaattggtccgacctcttctatactggtccagagacacaacaacgcctggcgtgatggctctattattcaaacaattattgaaataaatccggaatcatattggataatatcggattcttagaatacagatttcaaaacaattcctgcctgtcataccccggctacaccagtccgaacaccacacaagcgccctatatcagattaaaaaaagaatacatcaacccatcttcatttcgtaatggttggcagtgtgaatatgcgactttaaacgaaaaggacaagcaggatatttaccgagcagccgcagcttcgggtttagccagcatgtaccgcacagcttccttagcaacctcagagtcccacgggccgtcaacgccgccataactgaactcaggtccgctaccatcctcgccgcctccacgggtagcttcacccatgatagtctcgaggtcgcggcgctgagagctgatccagcgacgaacaaaattggctgggtccttgctcagagcagtgtagaatgagtggcgagcacgggagtgtgtaagggcctggacaatcaaagcaacttggtcatcaagcgaggatatctggcgtaggccacttgtgtacgctgggttctgagtgagagccatcatcttggtgcgcagcgggtcatcaactgcgacctggatatcgtagatggtcggggttgggtcactgtggaactcttcatcgacgcgaatggtgtagggaagcttgattggttccatagggctggtgtgaggaccgatgctttcaggaatctgggggaaaaacatttgctcccggccaaagatctacagagcttgttagcggatactagaaacaccagacattcaaagtacataccgagcgtagacggtgatcacagcgcacttgtcgcttctcctcgtcttcttgcaattccatggctcggatgtaatcccagattccgagaacaattccactccgggtctcctcttcgacatctagaacctcggccaactccttgctcagcttgtatcgctctggaacttcgtcccggacaaggctgatggtgacattcagattgtcctgcgaggctcgggagaactgtagactatcaaattcggcaccttggggcgctggtgtgttggggtgtgtgttgggtttggaccagttaaccggcttaacctcctcggggattgccgagacgggcttatcaaagtcgatggtgatagccttgaagaaatgggagaagcgctgggactgtctcttggattcggatttctttcccttatcctcctcggccccgtcgtggtccatcgcatcttcatctttctcatcctcatcgggaaccgtagggtcggtttcatcgtccaacagtcgtccttcgatgcgtaccttgtagcggccggagcctgggttgttgcccgggccttgccatggctggttttcgacagtattagagatccagatgcgcatagtccgatacttcttgacggttttgttgatagagtcttggatatccagcctcttccgaacaacagcagcatccaatcgcttttccaaatcgcggaggtttttatattgctgaacaccctcgccgatgatcacatcttcaatgccgtcggggaggttcctgtcggtcggcttgcggctgcgccgaagggcagcatcattcgggtggggcataggacgcgatgccatgtactgttgggcaacagcgtgttgtggcatcggaacaggcattgcgccacctatagagacggaaggttagagccgagacgaatgagtggagacagatgaaaggggacatacctggccctggggggcgacggggcgcggctggagatcgctgtacatttgagggcatggcccgagcataatgttgctgcattggagcttgcattgtggagaaatcaagcaacaaaacggtgctgggaggatatggatggggggaaaagatgcgagatggtggagatgcgaggtcgcgattcttttgcccgtcgcgctttacccttttcggacactcgcgaataacaccgtcgagaggagaaaagtcattgttctacatgaaattttgcagttgagatttgatgaataattaggagctagacatataagatgtagttcacatgttaagtactaattacgcgcagatctaagggtaattattgatgtgatcgtgcattgtcttgattatttcctatcaagtcattgtctcaactgcattggacatttcccatcttttctattccaggagagacgcctggttagtatacagaccttccaccacattgccgagcttttcaatggtctctagtgcggcatcgtaagcttgatcccgttctgtctcatcgtacacaatcagacatcccgagccctggtccaatacaccgatgatcaccttgtccaagatcatctgagacagcttcctttccacctgctgtgtgtccaaacccaccatcttcgcaatgtggtccagctcgacccggctgaagggttcaatgaccttgatcaagttttgttccagcattgcatcgtaaagacgacggaggtggtttcggatgaatacatcgctgcccagttcgaatctgtagtccgaaagagccttctcatactcctccaaagaccggttggcgtgggcccgtgccacggccttcattgcctccaggcgtggactggcatacttttgcgcttgtttcgagccttgtagctgtgtgacatcatccaccaggttcagcatgattttgcacagaagcatgtactgcaatgtcgccgtggccaggtcgctctcatcgagcgagctgtacccctcaagcgcttcaatgaaataggagtatgaagtggtgaaatccttgtcttcggcgtgcagcatgccactttgcatatccagaccggcctgcaggttcggtggcgtgtaaacggaggcggccgacgtccgtgcagctgtcagagctgcgcgtgccttggcctggttgcccagagcgtggtacacacgcgactcgagcagttgtacttccaccagcataagcttatcatccaggcgcttcagctcacggagaagagagttgataagagtgagcgcatcgtaataggattgcttctgcatatagattgcaacgagtcgggcttcgagggcctggcggaggaacgatcgccgctcggaaatagcccattctatgcatgattggatgacgttgccttggagttcgagtgtgttggggatttcgctaatcaggtccagaagttgacggactgaataatcacagttaggctatttccatagaagtaatttagcgcgcaacttacctagcttggctgttttcgctttggcaaatgacgagaaggtatcacggctggtcttgatgaggtccgcgatctcctgtggcttcttcgcatcccgatgcaactcgcccagcccaatcaaggcatgttcgtagtctcgtgaagatgcctctgtagatccggggccctctgagagaatcttctggtaactggtcgctgctttcgagggatcctccttcaccagatctcgaacttcttggatccgtggcgagaccttggatgacatgataaaagacggcaaatggcgagtgagggagatagagaattaaaggaaaggagaacaatagaagatggtggtttgaagagaggttgatgatcaggtcgaatggggagctcgaagctggcggcagctcgctgtcctctcaccgcccgcttggcaaatcaaacagaaaaaaagttcgctcttggcatttttcttttcttttctacttcgttttcacaacggcactatggtgggtatttttctttgaaattatgtcttttggatagccatgctaatggattatagaaaatcaaagcactctcccgctccacggcgtcgcaacaggcccccgggtccgctgtcgttcgccagtcgcggaatctcgacccgactcaacatccttttgagcgggctcgtgaatatactcgagctctgaatgcgatcaagatggagcgcatgtttgctgctcctttcttagcccagatgggtaacggacacgttgacggtgtttactctatggcaaaggaccccggctcacttgaacgctttgcaagtggcagtggtgatggtgtggtgaaggtgtgggatctaacgacgcagggcgaggtttggaatacccaaggtcatgaaaacatggtcaagggtttgtgttggacgccggagcgaaaacttctgtcatgcgcgagtgacaagacgattaaattgtgggatccatacaactcatcatctgaggccccaccgatggcaacctatctcggaaatagtgccttcaccagtgtcacgcatcatcggagcctcccttcttttgctgcggcttctggtgtcatctctatctatgacctttcccggccgtcatccacaccatcgcagactatgcactggccgaccaacgttgacaccatcacatcggttgcattcaaccagactgagacttctatcctggcttcaactgctatggaccgctcagtcatcatgtacgacctgcgcacttcccagccggtgcacaagacgacattgagactggcatctaacgccatttcttggaacccaatggaagcattcaactttgccgtggcgaacgaggatcacaacgcctacatcttcgatatgagaaagatggaccgtgctctcaatgtcctgaaggatcatgtggctgctgttatggatgttgatttcagtcccacgggtgaagagctggtcactgcctcatacgatcggacaatccgcctatggaacagatcaactggtcactcgcgtgacatttaccacacaaagcggatgcaacgtgttttctcggcaacattcacgcctgacaacaggtatgtcttgacaggatcggacgatggcaatgttcgtctctggcgtgccaaggcatcggatcgcagtggagtcaagactgcccgtcagcgttccaagctagagtacgatcaagctctgatccagcggtactcgcacatgcctcaaattcgccgcatcaagcgccagcgtcatgtgcccaagccgatcaagaaggctggtgaaatcaagcgcgaggagctcaatgctattaagaggcgcgaggagaatgtgcgcaagcatactaagaagactaatctggcgccgagaacacatgagcgtgagaagatgattctggccagcgagcaataaatcgatccactcgattcgaccaggctcggccgcaagacttgcaatcgaaactatggtcgaatggggaaattttcaatgaagcagatcgttctgctttataatccaccctgcttggacctatacaagggtcccttttcatgattcatgccaatatacaccgctcggctctatttgagccacctatcaatatgtcttcccagatgtctgccggctttgagtaacagcagcatctatcccactcagatatctcgcaacccgctgcaccgtagcgggtagcacggcataccaattcacgagctttgcataaaaaggcaacctgatcacaccacctcgaccgctatcaatcgctgccaccatctcccgggcaacttcgacgggttccaggattggcgcaaagaaatgattcggcgcgcgcacccagtcgaacaacggcgtcgacatctgaccaacttccactagcaatgtcttgatcaacgggttaacccgaacttccgcttctatcgtccgatgcagcgcgctaagtcctgctttgctcgctgcgtagtctgacagtcccgcagcactcagttggcccagcacggagctgactgtgacaagagttcctccactctttgctgcgatgatcccaggcaagaagacttggtacagatggaaagccgctaggagattggtgcggattgtcttttcgaatgcgtccgctggcagatcaagcagtgagagaccgttgatcctggccgcggcacagttgataacgatcgtcggtgttcctaactgcaagatttttagcgaatcagaccccaattgaagcaagccataacgcgctatgaaaacaccttatccaaatatttaaatcactagaaccgcagtaatagtaggatgatatgggatcgaaggtcacaacgaaaacaaaagtaaaaaagcaaaacctacctcttgcaaaatcctctccctcgcaacttctaaagcacgtctatccgcgacgtcacacgtgatatacaaaacgccctccccaaagacctcatcgcggcctttttccggaacatctttaatatccagcacagcgacactcgccccgcgcatgctatacatctgcacaattagcagacctagcccactcgccccgccagtgatgaccacgacctcatgctcgaaatcgacttttcgcggggcgccgtaggcggcgcgctggttgataattcgcacgacgaagaggactgtcatggccgttgcatagcttacagcgaggatccaggctggatctgttgatggggttacatgggcgcgtaggcagaggacgaaaatccaggctatgaaagggttgagtagtgatttggagaggatgcttgttaggatgtcgattgtcaggaggctggtgtgtggattggtcgagccgggagttgtctggggtggtttggctgttgtttttaaaacttgaggatttgaagatgacattgcaatgtctgctttggcaataattctggctggagattggatgtcggggatgtgcaatgagacaacctggggagattccagacgcgtttggttttgcggggctgataagagataagacgatctatataattctgtcttgtaaaaagaaaaaggaagacagacaagtatctggagacccaaatctacagagtgatgaactaggaattggttggccaagctgggtttgtctatgaaattcactattcgttcaaaaatgttggctaaaatccagaaaatgtttcattctcactggatctatcccggtgcctttcatgacccactgctaaggaatatatgctaagactcggtaccgctctataaaagctcacaacatgaatagaaagttctagctatctttgtataaaagttccaaaaattggaacaaaggagatgagagcagagcccctttatatggcggacaacgggagcaccagacacgtacagtctgtatccgcagagatcatagcaaagcccctcaggtatccaaagatcgccagtcggtagcccgcatgtacatgcttcgtgccattcgcagcctagcctaggccgcctacagagacccgccagagccaaggataacaccgatcgccagacaacagcagacatatgttaaatacgaatctggagctgggtgacgggtcaacggttaaaaaaacacactcattaggggctacgatgtgcaatgtggacctggagtggtagtgtgaagaaggaagaaagaaggaagaaagtgggaggaggcaggtatttataccgtacaggctgtgactcaggtcgacggggaaaccacgatgggtcacgagttttgaccaaaagggaaggcacctgattgggaaggtgccgtcaggtttatgccagagctacatggaaacatttgaagacaacgtaagacagcccctggtatgaaagagacgagagaagattagaatagaaagaaaaaatgtagagaaagactggtctattagggtgtagtcaaggatctatcttttggagacgaaaatacgaaggcgtaagaaaccatacagaacctgtagagcatcacgccataaggacgaaattgttatagctgaggacatgaagaaagacataagatatcgaaaaagaaagtcagattcacgaaacatatttgatcatatcgagcatccctcgttcgttctattcttgacgaaaaagggtcatcgtaaatccacgaaactccccatgattgtgttagacagtgcacctccgacttaaaccagaacaagatcgggatcaatcaccactgcatacgctgacccagaggcgaagaaggcttcttattctgagcctgcttcgctgagccccggatagaatgactgaaggtaaggcaattcttatcctcagccatgatgtcaagatcgctcggggtcgacggcacctggaagccttgaccagcttcggggtaggcgcggtaatctccagggtcataatccgattcatgctgggatccaacttgtgaggactgagatggagacggagtgggggattgggagtatgatgactcgtcgtcggtgagcaggtcagagttcgaagaaacgaaagaggccttgcgagcacgtgcacctgcaggcgcagcatgcgatgtaaatctgcgcgtggctctggaaggcgtctgggaagttgttgttgtagtctggggagcagttgtggaagcatgcgtgtgaggaattccggtggaaacctggcccgcagcgatgccaccaagagccgccggggaagcaggattgggagccgtatcggaaaccattgcagcaaagagttcttcgggattcatggaagtagcattgggggctgcggtattagaattcttgccgatctgttggtttaaacccatgtcgctagcgttcttgaatgatggttcctgattttcccaatcaagtaatgcagaacgaacgttttccttcagtgtaggtttggaaacccgattattgtgtggtgtcgcagaaggtgacagagtgaaatctgtcacgggttgcatgtcccggggaaacataggaaccgacggccactcgtttgagactctcactataagcttgactagcgaatcatgcgaaagagatgacagatacgcccgtcgttcctcctctggataataatttccaccaatttgaggttcagacacaggctgcttcttcggtcgttcgacttttttcaatttcgttgcaccattcttttgatatttggtctgggctgcctgacgttgctcaggtttacacttgatgcaaaaccaattcatctccgaaatttcgataacctcattatgaatgtttggactgtggcatttctgatgccacggagcatcacatgagtcacatagaacaatcaaattgttcgaggggctgtgtcctctgtaacaggcggtacaaactatattgacctggcggttcggacgcttccgctttttagctgccactttgacaggccctttgattgtcacaggctcagcttgtcgaacagttggttgagtaatacggcggccagatcgagttcgatttgaatctagggcagtgctggcatttctatccgtttccgtagccccagctgttgtccaaacggcctcttcctgaggcagtgctggtgatccccaaattccccaggatatattgtcagccataagttccgggtgtgatgacagtggttggatcgcctcggagacgctttcatggtcaaatatgttgccctcatagacgttttgggggcgctccggattgatatcgggagcagggaggtccatgaattccgatgagaccctcatagtgagcttcctttcgaataagtatttccaaagaagtattggccgacgttctcttggaaaattagttgaacttgggagcgaaagaagagaatagagcaacaggtgatagaggcactatttgtgttcttctagggcaatccgagtctttcagcctactgcaaatcaaaatagacactgtagtgtttgccgagtgggcagtcgaacatagttggctcctctcaattcttcaattggaagtagggttggattgaagtcgtcgaatgaaagcctttgtatatgaatcacgtgatgttccaatacaaccttaaatgtctgtcgtcggtcgtttactgacgtatttcgcctaatgtgaggatcttattaatttaattgtagattttgatgcttttattcgtcatcaaagctatttcgttatctcttatgcggatctagtaggttctatatgaagaaggaatcgtctcaatatactacaggaacttacgaccgaaataacctagcaagtaatgattcatattgtagatttcttaatcatctttaatcttgttttccttctaaacagaaactagcagaattgcccaaggaaagcccatgagcgtatacatgtaagagatatgaccaaaaaggattaaaagacgccagaagaaccgagggtaacttggaatggctgtgatttccagttttcttatatacaggtttcgggaggtgtcgttcatggttctcatagattattcagggtttaggatatgaccccctcatccttcatgcgagcgatatccgcctccccataaccgaggacattacccaaaatctcatctgtatgctggcccaaagtaggaggaggcgtgcggataccgggcgtcgcttcggagtacttgataggggtgttgaccatcttgatgggaccacatgcaggatggtcaatttccgtcaccatgcctcgtgccaaaactgttcgtaacgtcagtgctgtttatatcacatgtaaaggaaatacgcagacttaccatgtttgtgattcagggttccctgaatgtcgttgacagccgcatagggcataccgctgccttcaaagatatccaaccactcctgcgtggtcttctgcacggtggtgctttcaatcataccgtcgatctccgcacggtgctgcacccggccactgttagtgacgaagcgggcgtccgtcttccactcggaaaagcctagtcgatcacacaacacgccaaaaagcctatcattgccaccaccgaagagaatatctccgtcgctggtcttgtagctccggtagggtacaatggatgctgggaggtgttagtttgggtattatacccaggagaatgttcgctgcttacggtgtgctgtgccccaacggccggaatccttttgcccactgataagtgcagagctagccaggttcgatagcgtagcgacttggcaatcactcaaacaggcatcgatgtgctgacctctaccagtccgaccccgagcaatcaaagccgccatgatggcattcgatgtgtataatccggtagtcagatcggtaacagcaacaccaacctttactggtgcaccatcccgagaaccggtaatgtgcatcaatcccatctcagcttctaccataacgtcgtagcctgcacggttgctatacgggcccgtctggccatatccggtgatactggcatagatcaattttgggtttatttcccgcagagtttcatagtccatgccgtattttttgagcccccctgggagatagttttcgactaggacatcgcattcctttgcaagcttgtgtagaatctcgacgcctgacttgtgttgaaaggatagaccgagggatttcttattccggttgacctatatccctgatcagtgctatgataatttttatatagcttcgagagaaggctcgtacagctaggtagtaagcgctctcgccagggccctttctggaagcatcttcgtactttgcatatggcggaccccaagcacgagtatcgtcgccgcgcacagggtgttcgaccttgataacttccgctctgtatttcgtcttgtcaatatcataggatcaccaattggagctgtttcatagctccgaaggttgatacataccctaaatcacccataatttgagtacagtaaggctaaaagcgtcagcttgaattacacagcctatcaagagatggactcacaccagccaaaacgcgtgtcatatcaagcacccggataccagccaaaggtagcgaaccatcgaccgaagctgcactggagtagcttcgtcctggcaccgtgcgccgcaaggcattgctaccccaggacaagccggatcgacgggcagcaacctggaatctgagcgcaaccgtcatgatgatatatacgaagagcggagcgaaacaaaaaaatgacgctcaaacaagaatccccgttaaatgaattctggggaaaccggcgaatctccgccaaaacgccgacgccgacaccgctcggaggggctgacgccgagggcacacggagcattttccttgtagatcatcaaccgcagctatgtttacaggtcttgtcgaaacgattgggagtgaggatatctttctctttgtaacgtgagtcaatcgctaacgtggttttactagctgtcacggccttggagcctattgacacctcatcgagcgggggcgggggaacgtcactcaccatctccgactgtgaggagatcctcaccgacgcacacctgggcgatagtatcgcagtgaatggtattttactctttcgttgtctataacacatgggatattgtctaaaagtgggctcaaggaacatgtcttacggtcactgcattcgataagacctggttcaaggttggctgtgcgccagagacactgcgacgcacaaacctgggttctttgcagacgaattcccacgtgaacctcgagcgcgccgtttcagccgatacccggatgggaggacattttgtgcaaggtcatgtcgataccgttgcggagattctgtctgttacgccggatggaaactcgttggtgttccgactgcagccgcgcgagagagatattctgcgctatgttgtggaaaagggctatgtgacccttgatggtgctagcttgactgtcaccaaggtcgtcgatgggcaggatggatactgggaggttatgcttattgcctatacacaggataaggtggtcactgcggcgaaaaagcccggtgactttgttaatgttgagattgatatcgtgggcaagtatgttgagaagagcgtgcagggatactttgctggaacctctggtggagatttcgctatcttggagaagatggtgaacaggatcgtcgatgaaagactcaagaaatagatcagagatacgaataccgaatctccgcaacttgacttcattgcaatattcggccaggacaagaaaaaatgagtcatttttagctttctatgtcctagaatgaactaatcggtacatttccaacatcctttgattatagcgaatacaaggcatacatctagaaattcgattagtgaaagcagaaaagcataaagcccgcaagtatatgcaagtattgagatcattctatagtcttagggtctatactcatcgtcgaggttggatagttcgacagacagcacagcgactctctgatcggatcaaaagcattactaagttcaatttaaggatggaggatgatggatgaatttgcaagactgcattatatgaagacaaaacctgaaaaacgcctatatgcctatcgggtatgtgacagtgacaagaaaattttggtccatatgacatggataagacgtgaagacggtgatcatttttgatacagtccactagtgtgatagacaagccggcacggtttgacttcttgggtttgttcaatcgcaagagccggctgtttaccaagcgatcaagtagaagctttcggaaaggtgtggtgtgatgactcgaagcagccatttactcctccatagactcgtccgaatcggcttcagagtcgtcatctgccgcttcaccctcaccttcagcgtccttgtcaaagtcatcatcgctgagccaatcttcatcatccatttcctcgtcctcgtcctcctcggctgcttctttgccactgcccctggccttggccttctcctgcttcttgcgctcaatgttcgccttctgcagcttctttctctgctctttctccttcctccgaacggcccagctctggtccatattccgcacctccttctcggatttcgtaatgaagtcatgccacatgatcttgccatcgcagactccatcctcaaccttcatcaagcgaaggcgcaagcgaggacccagctctacgagctttacagcccgcttctcaacaccggtggtctgggctggcttatcctggcccttatctgcagccttttggcgctgcatttcacgcttgtttaggactcggcgggtcgtgctctcttgaacttccacttcggcatcggtgtctagctcggtctcacttgctgatgtgtagcctgcagcggaggggtcaagcaggtaatcagcggcatcttcgagctttccaaggttaggaacggcggtcttcttcttgtcccggttccgaatctctttggggtccaggcgacggattcgtttcgatataccggtcttcttcgtggcaatggcgtagtgacggagagtcaagatatacgagtcgctgtctttttcggcaggctctcggttgagaagcatgacacggcggatggaagatagaggctgggtttgggggttgatgggagggaagagggattggaagatcgtagttgtgagggtctcgagccgcttcggcactttagaatcttcggttgcgcctggtgtggtgaagttgttcatgaccaagaggggcggtgtcttgtggtcttgtccgccacttttggggcgcttcatcgatctctcaacatccttgcacagcgaatagttctcgactttgaagtgaagggtaggtccacggggagtaacagcgagtcgcatatttgtgttaccagttgcggacttggaaaacaacataagatgagtgacacctaggggcccggtcataacggtataatctcgcagtctgttggatttgcgttcctaatattgcttgttagaacgaacgaacagaatagtgattgtgaaacataccttcaatcgcacagcggtatctggctccatcatacgacggacatccttaaccaattgggtcacactgctaccgacttgagaagcgcctattctaatgaccatagacttcggggtcttggccattgaggcagcgctgcccttcacaacagaagcattttggggcttctggtgagtgcgcttcttgacacgttgcttggccattttgatgtgagagataagaaaaataaaattggacgggaaaagcaacgaatactaaatcgaacagctcgaggttttttttttctccaaaaattaacatcagaaacagcgccggatcaacaatattgcggccccacattaaattatttcttttgagatagttgaacatcgacaacttcctttttgttcaaacacaaatcaaacatgccggttaccaagaagcgcaaggtcgcacacgcagtacctgctgcacctgttgaagacagcgacgttgcatcaaatgcaagctcttcaagcccccaaaccaaccccgatgttgaagatagcgcgagcgattcaagtccccaacccactgctgatgaccccaatgtcgaagctgcttcctccgagactgagcccagcacttccagcgctcccaaaacattcaaagaactgggtctgattgactcgctctgcgaggcctgtgacaaaatgggatacaaatcccctacaccaatccaatccgaatcaatcccgctggcacttcagggtcgtgatattatcggattggctgaaacaggatctggaaaaactgctgccttcgttttaccaattcttcaaggtttgtgcatatttgatgacatgtaccttgtatacaatactgacgagtcttctagcactcatggaaaagccccagccgttctttgggctcgtaatggccccaacccgtgaattagcgtaccagatttcactagcatgcgagtcccttggtgcaacaatcaacgtcagatccaccacgctggttggtggcatggatatggttcctcagtcaatcgctttgggaaagaaacctcacatcatcgttgccacgcccggcagacttctcgatcacctcgagaatactaagggcttttctctccgcaacttgaaattcctcgtcatggacgaagcagacagactcctcgatatggatttcggccctattctcgataagatcctgaaggtcttgccgcgcgagcgtagaaccttcctattctccgcgactctgagctcaaaggttgagtctctccaacgagcctcactgtcaaatccggcccgcgtttcgatctctaccagcaagtacgctaccgtggaaactctccagcaaacttatatccttcgtccttataaacacaaggacatctaccttgtatacctcctccacgaattcatcggccagtccgtcattatcttcatgcgcaccgttcacgagacacagcgtgttgcattcctgctgcgcggtctaggcttcggcgcaatccctctccatgggcagatgtctcaatctgcacgcctgggagcactgggaaaattcagatcgaaaagtcgcgagatcctggttgccaccgatgttgctgctcgtggtttggatatcccctctgtggactgcgttttgaactttgacttgccaaccgacagcaagacctatatccatcgagtaggccgtacagcacgtgctggaaagtctggaaccgccatctcctttgtcactcaatatgatgtggaaatctggcaacgtatagaggctgcgatgggcaaagagttggccgagtaccctgcgccaaaagatgaggctatggtctttgccgaacaagtcagtgcttcacagcgtgacgccattcaggcgatgaagcattacgacgagaagaaaggggccaaaggcaagggaaagttctcgtttaagggcaagcgaagtcgcgatgccatggaccaggaagagggctagaatttcattctggctcatttgctgttctctgtacatgaatagatggtctattttacgaatttggggcgtttaagcatgtaatttgaaagaacccatagatttcattactgcgtcaaaatgatatcgaatattttcctggaccatatttccggagatccataagagttgaagaggtattcgctgcctaaagccgcacaggctagtgtaataatttcaatacggcctagagaaacagcggtccctaggggcatttgtcagggccaagaatcaaatttggactagggaatctattaggcgctgcccgcctcgctaacagcgttggcgacgcgagtggcaaggtcgtccgcctcggagcggctggcagcctcagcgtacacgcggacggcatcctcggtaccactggcacgggcgaaactgcggcccttgttgtatcgagactgaagagactcaatagtgctctgcaggccagcgggagactcgagcttacgctcagcatcatatgccttgaaaatggaacggtcattgacctcgacacgcacgaggcgcgaaggaaggtcggtgtaggtgccaagccactctttgggtgaccagcccttgtgggcgaggatggcctccacaagaagagcgtcggacaaggcatcaccgacagcctggttaatcaggtcggtcagggcctgaaggctctccagggcgtgctgctgcgccggcgattgaggctcggtgttcttgatgacctttagggcattctcggagaaggtgacggtaccatgtccgttggcctcaaagtagacgccaacatcgaaccgcagtgcggcgtggtggaggtgcttcacgccggtgttggtgcagataatgggcagcttgaggaccttctcaatgtaatctgtgcttgcgccgttggcataggcggtctggacaacaccaattttcagcttcgaagcaattccagcattacgggcaagatcgccaatgaaagatgccgcaagggtggcaatgcggtccccgtctagaagacggaacacgttgctgtcgtcctggaagtagtaaacaatacgatcggcgtcaccgtcaagcgaggcacatcgatcgagcacggcagctttggaagaaggaggagcacgttgcttggtcttaacatagtcggcaccgcactaaatgaagtgttagtttgatcaaaattcgtgtgttgggcaggtggaagcatacatcagagttcagggcgtcagggttgatcacatcatcgttgacaatcttaatatcgattccagtgaggtacttcatcagttccctcaatttaggtccaccgacaccattggcacagtctacagtcaaagaaccctggaccttgactccccgcataaccttctggaaggagtttgcaagcttctcatagtatccttgctcagtcggctcgccatactcatattgtgttccaagtgtgttcttgcagcgaacaacataatgaagctgcggggtggtcatgtatttaaagtccacaaactcgacctccgtcgcggtaagcgcggcattcagaacgcctaccagacgggagccagaagcacgggtgtcacgagcgaagaccacacgagcggggttggtcatggtcacgtcgatttccttgacgagttcgtcgtagacatcggcgatcttatccaatggggcatttgccagttttgtcgcgtacgcctcccactcagcctagttatgacagtgagtacgtattccaaattcggtctttcagcgcaggccaatcttacttcaagcatctcgccctaaataaaatataaggttagacttgtcctaatagggccggttctatggcagggctcaatgggttaactcaccatagggtcaaccaacttgacaccattgtcctccgcggggttgtggctagcagtaaccataactccaatccattgtccgctaagcttcttcgaccgcaggcttgcaagcaagcccactgcaaaaacaacggtgttgaggaggtcactgcgcagccagattggtcagaacaagtcggcgtcaacaaaaggatgatcgcggggttctagagatgtggaggcggagtggatcagccatgtttgaagaaacttacgctttcatgcgaaactataagggagagaatgaaagttagccgagtcgctagagtaggatgttcatacaaacatacccctgctgtgccatacccaaataccttgccctcgggctttgtgtattgcaacgccgcatcggtgattgctttcttgacagccggagaggccatggcgcaaatgtgtgattagttataaagcaccgtaataggtttcaagagaagaggcgcttagaagcttcaggtaaagtcgaagtcgaagaagaggggagtactcgaaacaaaaaaaagcggctgaggggtgagacatggtttattgcgacggccttagcggtgagcgaaaggtggggaaatacagaccaaagcacggcaggggacgtggtaataatataattacccgcattagacgccgtggaaattaactgcaacgaaaaacattctggtggggagcactccaaccttcattactgctacctccacgtctaagctacagtcaagcatgacatattagtatgtctatgctatcctggggatgtatatctatatataaagatcgccgaattttgccgaattttgatcctcttcatgccttgagcctatgcgccgcaatatcgtcctgtgtgtccctgatcaggaaccttcgggaccaaccgatgcattagtcacgaaaacgtattgtgtcgttggaacgtgggggacttacgaataccaccacacagcggggaccactgtacccagatgccagaggctgtgcgcgtcaatcaacccattccaaggggggaagtcgagcagctccaaactcatagccatgattatccacgccacaatcataccaggccaggcggtccaagacttcaaatgtttttggtatcggaagatactgaatccggtccacataaggttctggataatgccaaccactacgttcgctatcatattgtaggtgtagtcccaagaccaaaaggtaagataagacacgtgcaatacatatagcagaacgcagatagcagtccaaagtcgacgcagagttggccgatatggaggattttcaaggtccaggcggaggattcgaatgacggcaaggtagagaccaaacagcacgttggcgccagccgcccaatagtccagtttctcggtcagggggaaatcgcgcatgtgaaataacatgctgaaactccagcttgcgagtccaatgtatccaaacatcatgtagtatgggcgaagtgagtgccaactggggatcgactcttggatacgggacatgccgtgccagtgggcggcgaagttgaagaacgagaagagcaccgagaagggctcctgcatccctaggagcctacggaacggccatttcccgtggaattgtacaatcgggctgatcattggaggatcacgcgaaactcgacggtcggtaatgacatgttgacaggtgtagtcacattcagcagggcaggtccatagtagcaagcggaggtgcagcgctaaatagatcagcaaaggggaaacgcggcgaacggttggaacaatgatttgacatacgtagcactgaatttccgtgctgacaattttccgttttacagacctatggttgttagtcgtttccaagggtctgttggtcgcgggagtcgtacctggacacattctttgaagtcggggaggtggtctcctaatgacgcgttggacctgccaatgagggaggctagaaaaacgagagcgaaaagagtgtagagattcacttttcctacgcccagattcattgtgggccaaaagattagctccaaggtcttaggcgttcaacgcgtaagctttggggaagaatgacaggtaaggcggagctcccggcatcgaagagcctccctcggtggtcttggcaagatcaaaccagctcttttgtttaccccacagcgacatcattgatctactttattcaacttcaatgaatgtggaattggcattgtttatcatccttgtcaaatcgcgttataacttggagatcttggtagttcactcgaaaggaaaggcagggccaatggcgcaagtaatctactttgaatattagatatcgtcaattgatgctagttatccttgaagaagcgctattcttcacatagatgccattcaaatagagtgcaggtatgcattagtataactacgtagaactccgtacaatatagctgtacaactatgccacgcagatagccctatagaaatgagggcaagtagtgtcacgtgtgtcacgtgcgtatacacgtgatctcccagtacggctagtgcgggcggggattggagttaagcttggcgggcgggcaaataatccagaaaaaaaaagttacggatcgatctctgttggacttttatctttgacatccttcctattgacattttttttactcttgtcgattcttccttttcggcccgttctttttttcgcacagtcaagatggataccggatccgatagccctcagggcatcaccagcagtgctgatcgcatggttggcatggagcactctgaagtccgctacttcactaggtacgctattctccgttgattgggtatgttggaagttgatgctaatacatttatagttacgaccaccacggtaaattatctcgatccgtgatagcgaaatttttacgtgctttttactaacggtcattttttgggctgcaggtatccacgaggagatgcttgtaagtacaaatacactggctagttgactatttccagtctctaactttcattttctactttctagaaagatgatgtgcgcacacgctcctaccgcgactccatctaccaaaaccgccacatcttcaaggacaagatcgtcctcgatgtcggctgtggaactggtattctgagcatgtatgtatccgcttgattaacaacaccgtgctcttagatatcttgttgactgttttgtttaacaggtttgctgctcgtgctggcgcaaaacacgtcattggtgtcgatatgtcctccatcatcgagaaggcccgtcagattgtcgatgtcaacggactgtccgataagatcactcttctccagggcaagatggaggaagttaaccttcctttccccaaggtcgatatcatcatctccgagtggatgggttacttccttctctacgagtccatgttggataccgttctctacgcccgtgacacctacctcaaccccggtggtctgatcttccccgataaggccaccatgtatgttgctggtattgaggatggcgattacaaggatgataagattggatgtaagcaacaagtctaccctgaagctgtttttcttcgacgtactgatcattttcagtctgggacaacgtctacggatttgactacagccccatgaaggagattgctctcaacgagcccctcgtcgatactgtcgagatgaaggctcttgtgactgatccctgcccgatcatcacctttgatctgaacactgttaccacggccgaccttgcattcaaggttccttatgccctcacggccaagcgccccgacttcatccacgccttgatcgcctggttcgatatcgagttcagcgcctgccacaagcccattcacttctccactggccctcacgccaagtacacccactggaagcagaccgtgttctacctccgtgatgtcctcactgtcgaggaggatgagcgtgttaccggctgggtcgagaaccgccctaacgataaaaacaagcgtgacttggatatcagcatctcgtacaagttcgagacccccgatgccacccgcgctgctgagggtggttgcttctaccgcatgtaagttcttgtgctgttttgctttggttagttcttgaggtcattatactaatgcatcgtaggtgttaattttcttccacttttctctaatttgatgtcattgggatgtacaactgtacgtttgcacggtctaagtgaaatattttcgtctcgcaatgcatcctggcatgggcatgtatgaaattgcccgaggcgaatcggacatctggtttcgcctttgtttatttcggcgtttaattctcgggaggcaggaaaaaatgcattttgtggcgcgaacggagggatataattctgaagctcctcgaatttccaggtagatacccgagtcgatgcttagtctagcaaactccaacgctcttcttctggacatgttttccacgctacgatgtagacgacaccattggttgaaaaagctttcagcgacctaacagaaaagaatataagatctgcagggggaaattgtgccaagaagaggccctcatcggcaaacccacggcaacaaatccaaagaaattatcagatcctcggctccttgatggcccccgcaattaccggagctactttagtgtgccatctcctttattttcttgatttcccttacccttgaccctcttttttttatctgatcttatattcatatctccttcgtactaccatcccaatgtcggcccctggagctggtcacgaattccccgcccaagaggtttcttggcagaagcgcgatgtgctattgttcgccaacagtattggtgtcaaggccgatgagctgcacttcctctatgtatgccacgagccacatatacactagtctaaatattattctaactggtatccaggaactccacccgaacttctcggtcttcccaacctattctctcatcctccgtatgttgatcgcccaaggaatggtcgggcagcactaactccaaagctattagcattcaagctcactgatcaggaggtgactgatttctatgcccgccaaaaggcagttcacattccaggcgtccctgacctggaccatcgtcatggcgtcgatggtcagcgtaagatcacgatcctgaagccgctccctaccactagtgcagggcgtaagtttgagctacgcgataaggttattggtgtctatgataaaggcaaacctggtactgtgatcgagaccgagcagtctattgtggataaggagagcggcgaggtctacaccaaggtcgtgagtagcggtttcctagtcggacagggtggctggggtggcccgaagggtaagattatagttcccctatccagcatagagtatcaactgacatattcgagcaggacctagcaccgtcaactatcccccgcccgagggcagggctcctgacgctacccatgttattcagagcaactctgagatagcccacctgtaccggtaagtactcggtgcaaacagaattcggcttgtatacttgaaacgtctgatgctgactccttgcccagtctcaacggtgactacaatcctctccatgccacaccagagcccggcaagaagatgggctttggaggtattattgtccacggccttttcagctggaattcagccgcgcacgggattctgcgtgaactcggtggtagcaaccctgccaatatgaaggagttccaggctcgctttgcctcgcccgtccggcctggtgataagcttaccactgagatctggagaatgggcaatatccaggatggctatgaagagatccgctttgttactaagaatgacaagggtcgggttgtgttgagcaatggccgttgtctgttgaaggtgacgggggcgaagagcaagctgtgattgattatgccaaagctcggttcaatggcatgtaattggactctaaatacatacctaggtatatagcaaataccttctttatcaccacgtgccattttcgtagaaagtgaacttattgatgtccgtatagttccttatatatatatgcacgtgaccgcaacctcggttgtcccaccctacaaaaattggccaagcactgctacatatctcctcgttcttgaccctcccttctttctctataccgattatgagcttcagttggcgcacagcgctcaggccgagtgggctgtggagtcgcgccgggtaggaactcccattcatgtcgaattgaacgttcaacgctgaaaccctctcggattagacccaagagcctgagaccccgctattcccttgttagtgatttggtatggatttagcacatcatttacacccgagtcgattacaaaaaaaactaactcgatctctctgttctgttgttcatagacaactggccaccgacatgtcactggttcctccagattgctgaacaccaagatggcctcgaatggccctcaggttgcttggtctaagtccgacatagtaacctttccaggtaaggatagaaaggatctggaaatcccgttaaacttgtaagtttgttataagtccaaggaaggtgaatagcagctgacttcgattttgtagcggtctttttttcctcaggttagtgaccaggatataaaagcagaggcttgacctccacctcttattgacaacttggtgcccacgactagagaaaactgccagtgtcccaaatgtattcatccggatacgatgcagaggataagcaacactttctcggtaggaaaattacggctccttgtgattacttgttatctaatactacgcctacagattccgcaaaacgtcaagatagaatcaatcgagcacagtgacaatatggtcaagatcaagtgtgagagacgacatgcataactttgaattaccatcagaactaacaccgccacagggtctgataatcacacgggactttattcgtatgattggcttcgtgcacactcgcaggacttatctagcgttgaaggaaccaagtcggtgccatatcctcaatcggcattgcaaagtcccaggtaagttattcaaagccaaagaaccagagtcacaggattatgttaacaccatggaaggcatttcaccccagtcgtggattcagatcagagtcccagagtcaaatatgacgatgttatgtcagacgacaaatctcttcaaatatggctgagccatattgtaagcccttctgtcttgactccttgatcaaacttgctaacaattactaaagtgggatgaaggattctgctttgtagacgacgttcctatcaacccagaggcgacccaatctctcatcgagcgaattgcgttcatcaggaacactcattatggtatgtaccctagatcaacgattcaccaatggctcattcagctaacatagcttcaggtggcttttgggacttcacagccgatttgacttttaaagacacggcatacaccaacgaattcctcggtgctcatacagacaacacttatttcacagatcctgcaaggcttcagctcttccatctgctatcccataccgaaggatctggaggagagaatctcctaattgatggatttgcagccgcaactcaactactccttgaaagtcctgagcattatgcccaactggtaaagcataggcacccctggcacgcaagcgggaacgaagacacctgcatccaaccatccgccatggcaccggtattttcgattcatccggatctcaataaaatgtaccagatccgctggaataactatgatcgtgcaccaaagaccaactggtcggcatcggaacagaccgaatggcaccgcgctgcgcgccactataatgagatattgcagaccagagaagtgtggacgaagctacaaccaggatcggcactcagtaagttctttgtgccattgtgatggctacttcagcttacatattttgtcttagtattcgataactggagaatgttacatggtcgctctgagtttactggaaagaggcgaatgtgtggtggctacggtatgtatttctgatagcgcctgttaatgattttgtactaacgaagtgccagtcaacaacgatgactacatttctcgacttcgcctgctcaagttcggccggaaagaggtgctggacaacctgggcaacgttggagacaatccccagaatccttattggttcatctaggttctgtggtacctgatgcaagataaatccacagaaaatcacattgtataaagcaaaagtgattcaagtacggagtaactagatagaatcgaatcgcacttgattataaacttagatcgcatcacgtgatcctctatggctgacgttgttggagctcggccaccgacagctcttcctctttccccatcttccccccatcctttccaatctacccacctactgtctcttcatttccgagctttttaatttagttatctcataattcgcaatttctcgattccgccatgtcgactcttgaggacctcgaagaccttgagcaggagcagagagagaagaagcaagaccagaacgatggcgatggcaagaagcccgaaggtgacggcgatgccgacatgacagacgccgataaaaaagacgaagaagaagagatgctggacgaggatatcttgaactcaagcactgcagacattgttacgcgacggcggatgttggagaacgagatgcgaatcatgaaaagcgagttccagcgtttgacacatgagcagagcacaatgagggagaaggtgaaggataatcaagaaaagattgagaacaacaggtgtgcattcactagtccccgtattcgctgttctgcaagcccgcggagctcggtggccggcttgcggatcggcgaaaagacactttaatatcaacagtccactgacattttcatttgtgactatataggcaactaccataccttgttggaaacgtcgtcgagctattggaccttgatgtggaggcagaggcagcagaggaaggagctaatatcgacctcgatgcgacccgtgtaggcaaatccgctgtcatcaagacctccacccgccagacgatcttccttccgctcattggccttgtcgaccatgaaacgctgaagcccggtgacttgatcggtgtcaacaaggactcatatctcattctggacacactaccggccgagtatgacaaccgcgtcaaggcaatggaagtcgacgagaagcctacggagaagtacacagatattggtggtctggataaacagatcgaagagatcgtggaagccatcgtatggcctatgaaggaggcagagcgctttaagaaaatcggcattaaggcccccaagggtgagttactttcctccttcccctgtgcttcaaagctaacattcattttccttcccaggtgctttgatgtacggacctccaggaaccggtaagacacttctggcccgtgcctgtgccgcagagacgaacgccacattcctcaagctcgccgggccccaactggtgcagatgttcattggagacggtgccaagcttgtgcgcgactgctttgccctggccaaggagaaggcgccctccatcatctttatcgacgagctggacgccattggtacgaagcgtttcgactcagaaaaatccggagatcgtgaagtgcagcgaaccatgctggaactcctgaaccaactggacggctttgcatcggacgaccgtatcaaggttctagcggcaaccaaccgagtcgacgtgctggaccctgccctcctgcgctccggtcgtctggaccgaaagatcgagttccccttgccgaacgaggaagctcgcgccaacatcctgcagatccactcgcgcaagatgtccgtcgaggacagcgtcaactgggccgagttggctcgcagcacagacgagtttggcggtgctcagcttaaggctgtttgtgttgaggctggtatgattgcgctccggaagggtctgagcaagatcggtcatgagaactacgtcgatgctatcgctgaggtccaggctaaaaagaaggataccaacatgggcatctacgtttagagtagacggttttcctttttatgtcccgatccatacactttctctgctttgttgcctctttgttccgagtcatctcgtgtatgtatgctccctcggcttgaatggaagccggtaattcgttatgcatgaatggagaattcttattacgattttctttatatctccgagtaaatggcacttaatcttttaccatgccgtgatactctgtggcggagttgtactcgtagacatagatattctgattaaagtcgtgtttgatcactggcattgtggcgtagaacaataactgccactataaccattgatgcatagtgaataccacaacagcctagaaaatccccaagaggaaaaaaaaagataaaaagacacgcaaagatgcaatagtcataaatccataccaacaaccgtggctcatcacacacacccgcacaacttccaccatgggttttatataaaagaaacaggaaaggagttagaaaaggagaatccaaagagtcaaagacaaagaacaaaaggctccctaatcagaaagccgccagttccaagtctcaattcttaccctgggtatccttgagagtaacaatgcgattaagcaccaacttctcatcagtcgactcgcgatcgacagcaaagtacgcaacacgcattccctggaagcgaatcgagtgcttgtgctcacccggctccgcagcaccctcctccttaggccacggcgccgagcgggagatatcccggattccagtctcgaccatggcatccttgaagatctcctcggagtccgggttgatatcggcgaggaaaccggccgggtgggcagagggatcctctgacttgaagagcgagttgaaggcgcggacttcggcgcggacggggctgttgtgcgcggccgactcgccgatccagtggatgaaggacttgggtttcgtgggggcttcgccttcggcgggtttctcgtatttggcgtgcacgcaggtgacttcgccggtggcagggtctgtttcgaaggaggtcgccgtgatggggtaggggactttgaggaggccgacggttttgccgggggcgaggcggaagtagtctggtgagtcaacggcgcggaagtccgagcgctcgatgtagacggtcttcgtgaaggggatgttgtgggtgccgaaggctgggtctttggagaaggggcagtcgatgagctcgaggtggtcttccgggaggtcgtcgatgatgaccttcagcggctcgagaacgaccatcagacgtggcacggtggtctcaaggtactggcggacgatctgctcgaacttggtgacctggacgttggtggtgttctttgttacgccgaggtcgttgacgaaggagaggatggcaccggggggcacgccgcgacggcgcagtgcgatgagcgtgtacagacgtgggtcatcccagtcgcggacatgtccttccttgacaagctggatgatcttgcgcttggagagaacagtgccggtgatgttaagacggccgtactcgcgctggttggggcggtagacctccagcttatcgcagagccactcgtacgagacgcgagagagctcgaactcggttgtgcacagtgagtgtgagatttcctcaatgctatcacacaaacagtgcgcgaagtcgtaggttgggtaaatcttccacttgccgccggtgaggtggtgctgcttgtcctcggagcccatgatgcgccaggcgaacagatcccacatctgcgggttcgggtctgtgatatcctgcttcatgcgcagagctgcctcgcccgccttgtattttccgtcgcgcatggcacggaactcggccagggactcctcgatgggtcgtgtacggtggctgcatgagaagcgttcaccgccgcgctggccgccctcgatctcaccacgctgggccttgatctcggacttgttgcaatggcagacgtatgcaccatcacgcttgatgaggtcctctgcgagctcatagagacgatcgaagttatcgctggcgttggtctcacgcacaggtgtaaagccgagccatgtcacaatctcccgaatggcattgtagtaccgctcctcctcgccttctgggttggtgtcatcgaagcgcagaatgcactcgccaccgtggtactttgcaaatccaaagttgatcgcgatggccttgctgtggccgatgtggaggtatccgttgggctcgggtgggaatcgcgtgcggatcttgggcacggtctctgaaaggggcttttcctggtacacgtcgtgcaggaagccgaccttgaacatggcttcagggtcacggggtgcgggagcatccttggccttgggtgcctttggctctccctttgttttaggctggtcctgtcttgctagcttagccgccgccttcttagccgctgcggcctctttcttctcctgactcttggacttcttgggtggatctgtaggctcggtggcttccttgggcctctcgggcaggtcgacaggctttgcggggtccattgcgacggataacaattgggaaagcgaaggtgggggatatttttttctcacgaggggctctttgtattcaatgcttatcagttgacattcgcttatcggtccgattcagcccgggatgagtcatcttctatactgccagagaataccgacctgggcccctggatgccaagtgactatgcatagggcttcagggctatttttacatataatgagtcatttcatatgcggttcaattcttaatttgtgatcaatactgtacaaatatgatacaactatgatacagggagtacgcagactcaaaaaagacagaaagaagcacagtgcacattaaccttccaccgatgcgccaataatgatacaacaatgaaagacagttcgaatgaccagatccaaagcataccggatcattatgcaacgctatccccgtacatctgacacagcaatgcgtgtatcatgaaccctgtacaatgagataagaaccagccaactaaatgatcggaatgaaataagaaaaacaagagataagaaaaagagaatacaacaagtgtggggtatatggcgcagaatatgtagacaagaaataggaggaaaaaagggatcaagaagtagaaagatcggggttagaaaagttgtttaatgtcaacgagctctgaattgcccggacggtcacgctccatatggaaccaccagtcccggcccgttttgtggttccaggttccagtgcaggtatccttgtcccaaggcaaggccgagccctgtacactactcataggcgtgcttggagtcgtgggtgtcgttggagacgtacccatcacagaccgcccacccaagcttccccagccaaacctggaaatggtggatgcaggcgacatgatatcctcggggggtggaataaaggggctcccgctgccgaagcagttgacgcccaccccagcagcatacaacagtgactgattcgaggctagcaattgtttccacccaatcaagccaccgtctgcctcctgaccggtgatatcaggacggaggatgaagtgaggaattgatgcgcccgttgcaggatcgcggaaaccactacggcccatcaaggttggcatgcggaactcgtagaccgttttggggccgctgcagtcattagcctcatctttaaaccgctcgcaggcagcccagatcccgtagtcatccatttcctgctcgggctcttcttcgaattgggagttctgcgcgttgtccggcacatacgtgtccgagtaatcttggatcagaacccgcatcccggcctcagtgtccttagcggccatgtcgatgaacgtctgggcacgaattcgggctgaggtcagattatttcccgccggtagagcgagcggtcgagtattcacggaaccgtgggagctgcggggcagactgtaccggtctggtcggagtaaggcttgtccctttaatacaggccggcagacagcctggagggcacctgggggttccacgtcgcagggtgcgcggagagcttccagttgaggaaaaccagcggagatgatactttgggcaagatgatagttgggggtattagagggttttgtgggtttctggaaggggagggtatcaagctgggtgagggctgtgcctgggtctggacatgccacatcccagtggaggtattttaaagtcgatgaggccaggataggctggaagaccatatgtccgtctggcaaagtaggacacttttccgtctggactatcttgaaccgctcaagtcctcgtagtgacgcgaggagtttggagatgactagcagtgactcgatgttctgctcgactaggacgagtgtcttgagggagagtgattcgggtcgcgacgtgtactgcgaaagaccagcatctgtaatcccgggcaggttctccaaccttaatgactccaagggtggcagacacatcaatgtgctattatcaaaggagtctttgttgaaagaggtaatgcaaaggtttcgcaatgagggaaggagattaaagatgcgtagggagatgctaggttccaatgcgccatttccgttcaatccataaagcatcagtgtctccagatttgtccacgaggtatggtaatccagaaactcgaacatttgcgaaggacccagactcccagggcaggagtcgtcgcgcggagatagctccggcgctcgtgcggcctcgcccaagacccatgtgtgctctttgagctttttccgggtcgacaaagcatgggtcagacgatcgaattcatggtgatacggaatagacaagcctaataggcgctctaagttcgggcacaccataaccacggacgcgaccaggtctcgatactcctgccactgggtaccttgtttcatggtaaagagcaaatctaattggggcacgcgtagttcgtatacaaggttggccagcaactttcgttcgcggagggttcgtctcaagagcttcagacgactccctcttttgaggcggtatttcttgagttgagccggggaatcatttccaacgatgtgtatactgtgatatctagtatggtatgttcagtcagcaaacactctttggacttcttcctaaccctgaattaatcaagggggctggactcaaactcacagaggtcctctaacggccttttcccaggaccgacaggtcaaggccaaggcgtgtaaatcgcgttgaaaacacgtcgtacatcctgtctggtgctgccctttgtgcaactcttctaaatggtggattatcacttcgtagacctcgtgtggtattctgcgttgaattggctcggttaacttgggaagggaattgaccgagtcgcattgacggtaagatgaagccggggacgatgggggatatgtggtcggcgcggttgacgcggtatagttggttcggtaggaggataccgaggaggttcgtgaatgaacggcatcgtcgacatgattcccggggatggaattgtaagataccaccggggtctctgttctaattgcgacaacactcattgtgaatgtgatctggcatcggagcaaacgacgcgagacgggaaaaagcagtgtaaattcccaatagggaggtggaggggttcgggaatgtagggaattcggaagatggcgtaagatatggagatcggcagattccaaccgtttttatatagtcacacaatacacgtattgagcaatccgatcgagaaacgaggcgaagagaaaagagaagggaagaatcataagggatatgtgagaatgaaaggatcagacacgctctaagaactagcattggataatcaaaaggaaaaagaaaaaaggacaagaaaagaaggaaagactattgtcagtcgatctcccccacatcagggaatgagttgaaggtccttacccgtggactccattcagactgtaagccgtgcagcatgcccaagtgtaggagcggagacgggaagaggcggttcaggggttggccctatgatttttggtacagccggatgtgggaattagacatatgtagtgtttatattgtacattactacagtatagaatctttgaatatctaaaatcaagaactgcaattctctgatatccctacaatacatccaaacctccgtacacaggacacgccaaggaacattgaatatcaaaaacgtccgagggttcgtggacgtgaccacgctatggctccgttaggtttagcgcgatgggtcggggcagttttagtccggttaagtgcattttaccccttttccgtgtttttcttttcttttctctttgctgttggttatgttgcgcgccgtgatgttattacatgtatcttattatctgttatctcgctatctcgttgcttttatccccatttagaatgataacactgtaaggcgtttcagtttatattgttcccaggttatcccctttctatatctaaacggcccaagcgcatatcatcctgcaggccaatggaataggcaattgggcggggacgccaattcttacttttgacttcggctttattacggagtacttcagaatggtctgcgcgtcactgcatggcataacgggatcgacatatatatcacttttataattatcagcatgctcccgaatataaccactatcacatagtctaaccttggatcgtacatgttgtacctattattaaacttaaaaaaggcatggttcgactcaatcccctagcaacaatctcccgggacaatataaatagcaagatcagcgaatcggtcattcacatgtaaaagactcaacggatagtacggaggagtccatctacataattccccttgacatgtaacaatgtatatgtctgtatgcgctaaccaaccaaaagcggaacgctcggctatgtatgtatatttcaatccacttcaacaggtcggaacatggaagagtctcacgactgaaactccgatctggtggagacactctgagggtcctaagtccaatacggccaattgcaccaatcgatcttgttgcgctgacgactagggcttgatagtgccactctcggggtgttcctaggttcaatgcaatctcccgtcataccatggaatatagcatagacaattaggggtggatattcggtagctgtgagagaacacatgtcgtatgatggcaacggtccttcacggagtctgtaccgagctgctccataataactaactatatactacacagttagtcactaccttggacgtggttcggacggaaagatgacgaggcaagccaagatgccgccgacgccccatacaagcgctattccttattgtcgagtagaaaggctaggtgtcattcaaaggaccttactattcagagcacgtgagagcatctcacacccatggacagaccatggagaccagtacatggacgagaaacactaatgactctgatacgaacatcaaagtttaaatgcatgcaagggaggggctggatctagatagtgtttcctagtgctgtgtacttgtacttggtgtttatatttagcatcaacctcaaaccctcacagtttcgccttcgccgtctccttctcatcccccctaaagcgataaacaacatccccaaaactgcccgtaggaaaaacataaaaccacctcaactccacagtcccagtattaacaatcccatgctcggcatccgaaggaataaagaccgtactcccagcgcgtactttgctcacaaccccgtcgatagtcacatcgccctcgccgtcaaggatatgatatatctcagcctgtgtgtggcggtgcgcgcacaggtggcctgtcactggggggcaggttgctattcctgcgcacaggtgtgtggactctgtttgcggggatgagattaaggtgtgccaggatatatcgccgtggattggggctgggaatgtttctggcgatgttgtttgtgtgtaggtcgaggggaggattgttggttttggtctttgggtcatttcggtttttggatatggatagactatagtgggaggtgttgatgtggttctggtttgcgggggggagggtttataatttatcttctctgttaggttgcgccttccatatttacatgtgttaggtagttctcaaacggaagaaacgaggtggggaaataggaagtggcagatgtagaaggagcgtggttgtcgaggaaacactttcctaaaagagaaagtacgtcccaccgaacatgacctacactccgaccttggaaggctgcatgcattatgtgcctaaaacagatcgcgggataagaggagcagcagtgataggaaagtatcgcaagtaacaaagaactccaccgctaatggatggattatatggaaaaatctgacattcgactagaacagcatatccgtactcccatgcaaatgcggaagcagatcgagccccataagacaccgatgccagtctgaacgccatgcaaatggacctagaatgaaaccttctgctacaactcggttatcctcgaatctgcgtagcttcaatcaacctggacatgcaaagaaaaagaaaagccgtgaggaaacatcctcaaattatcaccgtaccgtgctggaacagaaaactccacgaagagcaagcaaagggagaagcaggaaagaagaccgaaggaaagaccggagaaaaacgtgcaggtatcgaaattcaggacatcaatcccagcggatagagaataaagttatcaacactgtgccggagacaggatagaagacaaagactaagagaggtcgctttgactaatcgccccagaacatgatgactgacaataaaggtgcacaatgaagattacccaaacccaactccaccaaacacgcaagaaacccccgggatttcctctgaaactggacatgaagaaaccgaccgaaaccccggggagagggggggtatgtgactgggagccggcctaggaaaccgacaaaacaaacgagcaggttgtaaccataacaagtagcgagtctcaagattagtacctaggagtggtcctacgatcaaagaatgatcaccatctcaacccggcgtccgacagaacagtaaacagactgaaaggatgaaggaaagaaaatgggggcaaaatccgcagaaacaccagcatgagaagggaacgggaatcagaaacaagacgacgacggtaaatgggaattgaaagggaaagggaaacccatatttgcgggttggaagtgatgcaatccgaaggcatgtacaagacaagacaaagaaataataatgtatgccagatcaagactccattatcatgcagtaggagaaaaaaataaaacatgatcacatgtcggtatcgtcaacgttgaaaatcccgggttcggtgccgtcgtgcgtcttctggacgcctgtcatgcgctggtcgaccgagttgccggcacggtggcctcgtcgccagtgatcgtcgtgcatggagtcctcttccatatgatcgctgtcgtccataaggtgatggtctatagaactttcattcacaaaggtgaagcccttgaaattggcttgcatcccgggggataagggtgtggaggctggcatgaggccgttggcgagattcgcggcgcggagattgagcgagttgttcagctccatggcgtttgtgaattcgggatcgaagttcgatgtgtcggtttcagactgcagcagcggcttgaacggaggaatcacttccttgcggcacagcgtttcccagttgatgtcgtggaagaatgggtgtgccatgagctccttagcatcgccattggcgccaagacgatgcttgggattccggttcagcagacccttgacgaagtttcggccctcggagctaagcgcatcacgggggaaccggactttgccgaatgcgatattcttatacatctgctgagtatcctcggcgtagaacggactccagccacagcacatctcaaagaccaagacacccagggaccagaagtcaaccatcttcgtatatccttgctcatcgagcaatacctccggagccagatattcagtggtaccacagaaggtattggtggtgtcgttttgtgacaggtttgccttggataaaccgaaatcgcagagcgcaatgtgaccgttggcatccaacaggatgttctccggtttgagatcccgatatacaatgtcgtggtcgtgcagatgttgcagagccaggatcaactcggctatgtagaacttcgcccgggcctcctggaaccgaccctcacgctgcaagtgccagaacaattcaccgcccgacatgtaatccgtaaccaggtagagatctgttggggtttggaaggagaacttcaatcctacaataaaaggagaggccgtcatcgcggttcggactaagatattgcgctcaccgagcgtgtgtatcacctccttcttctgaatgataaccttctttgagagaaccttcatcgcatagatacgctgtgtgtccttcttcttgacttgatagacctgtccgaaagttcctttaccgatgagtttgaggacgaggaagtcatccggtccgacctgcttccgatcagtcctttcaaacttcatatcgagatgaatttctccagacacttggctgtcgccggcaccgcgcgcgaccaagggaaaccagccttctagtcggctgtgatcctccttgaggttgatgcagaggcgtacgtgacccaagaaagcttcctggttgttacggtcatagactgtgacatcgagttctgattgatctcccataacatcacttgaaagaacgtgttagtgagtgacacaagtgaaggagttggggtggggtaacatacaaggtggcctcgtgatcccagtgcgggtctgtcacgggcgtccgtcccttgtgctcaccctcgacggcactgttgtgagagctggatcgggtcttcaacggaatagccatgggccgaccagcagcctcctcggcatctgactcctgctggcgcagtttcttttcctcctcgccgtcgcgagcacctttggagatgtactcattccattcgaatacacacaccacatatgggtcgaaacttggtcgcagtcctcgaccatcggtgatcttcaaaaataatttaccattgatcgggcccgtgggtgcgccgttggccggggattttgatgttgcagccgcagccgcaggctcggcctcaggcgcaatttcagactgggactggggtgggaatgcttcatcgagtttcatagtaatctcgtccgtggagctttccatgtcttccgactttgactcagactgtggggtctcttgcgaggtctttttcggggcggaagtggcggtcttttcctgggcggttgggagctcgttggacatggcccggggagtaagaggtggggtattcttaagacgcgacccatcgggtgcgttttcagttagcttggctaggttctcggaagatatcgagacatgcggtttctcatggtcgaggaggggagcttcagtcagggaagaggcatctggagggagggatggattgcaaaaatgggtggcaagaacggggtcgtcagagatactggatactgggagggaggtttgacggcgggaaggagggtcttctggaggagtttgtgtgggtgaaatgaggtaattcttcagcgttgtaaagatagaagacattgctggactcgtcccgaggtccatctcatccgaatcatgctgtaacaaggagtgtggaggggtgtgcagactggggtgttcctcatccatcttatcagacccatcttcccgctccatcatgacaaaagactcggatgaatcggaggagtgttgcgtgtgcgcatttgattgaagggtctcagagggtttcgacagacatgaccataaccgcggaagactcgctttatcaccggagaaagaaccaacctggaagtagttgtgcataatggaaggcagacgcttatcggccggatcgggctcgggtgttgcgattcctgtcggcgtgggggtggaatcaggcgacccaatctgatcttgggtatcgtcttctagtccggagctatgagattaaaaggtcagtcatgagaaatgccagctccgatataatctgcaattccacaggctgtaggcaaattccgacaaggtccgagacgaaaggcgaagcaccaagactttaagagaaagccagcatcctcgaaacgccatgtttcatgcaggtcaaccctaacaagaacagactgtaatgcaatgcggtgtgaggggatcgtggaccctctttttccctccttcaaccccgcctttcaaagggaatgccttgagtcaaataagagatataggaagttgactcacttcattgtcttcatgtcgtcgccgtgcaacacgggtccactctgcgcagccattgtgtttccattcaagaacgtcgaaaaatgaagaggaacaagaagtgggggtaaaattgggaagttggaaagaaaaaaaagagatgcggattttttgatgagctaagggagtttgcgggatgaatttgaacccgttcggattttccccaacaagaaaatgaaatcgggtttatttccagttttattcgatttgggaggtttggaaaagaaaggaaaaaaagatgttgatttggtagtttttggatttagaagtggaattctctgcggtaatatagaaccccactgaaagatccttaaagggttctcactgatagtccatgtttccgagtgtattatcaaggcacgtgtaagaccataagaatataagatataatcttatgggataacccagctgaatgaagctgatgctgactataaggcaaaggtttcgaaaaggactagaactaaaaaaaaaccctgcaaggacattgacgccttcttgtattctcgaataatcccgagccatccacgccttgtttcccgattcgtactatatctcaagagggaaaatgaatgagaaatgaatcagagctgatattattattagaaatcagaaatcagaaatcagaatggaatattattaggaaaactaacgtcatgtggaggcccaatttgctcaatagccctagatatcaagacctcttcgtctagtctttcccttctgattccgctttctagaatgtgaaggaaacaagattatcgcactttcaggtcacggtccctagtccgagtgacattaggctcccaagaacatgtggctacacccttttcacaagatgttgagtcttatcgcgcttcgaatctccactcacagcggggtatctcgttcattcttgcatctgatgacaacatcggagtatacgaagtagcgacagaccgctttttatattcggatggtttccgtgttctagtactagtacctatatatatgactcaaagccggtacgcttagtctatacactaccctgcttaagataaatctcttgcgattcttttgcataaaataatgaactacaattaactctgaaacccaaagatcgagaccgtgacaatctttcagctttcaatatggcccgggtctagctctcagctcctcttgcatctacatacataccaggtgaattgtgagatatgctgtggtcggcagtgggaccttatgtacggcgcgccccgatgacgcatgtggaggccttagaggatcccagtctttgcgctaacgtgtggttcggtggatttaagacccgggtcgtgcgtgaatgatgtacgtgccacataagtgagcttactgtgactgtacagtcattgtagatgaaggaaaagagaccctaaagagctatgccgatctacggttttggcccagcttatccaaagtaggatccatgctctcgaataggtggggcgaaagaggcgatcgacgcttacttccgcaacctcccttttatgtagtatgacgaatgacatactacggaaataaagatccaagacgttgattctgggatgatatctgacttcctcataccctggacttgcatgataaaagtgtgttttatttacatttaacatggtcgtacggttcatactcaaatattggacatctcgacaaccttcgtggtaatgcccggagtacagccgagacctgcatgatttcaatgtgcattctccgttatgcacaagatcgagtccgagtttggattgaatttggtcatctgcatcgggagatgatcggcgggcttgtacgccgtgcaacaaagtaagctcctctgggatatatggttttactcgagcttccagctggctgcagaaactatatttaatcagaaccaatatattttccgggggcatccttatattaaccattcggatttcccggttgccgagccgaaaatatatggcttcggtccttctatctgatttcttgcggcgtttttctttgattgctatttaaacctgctagaacgaattcagatgttatctataaacaactggtctaagagatgactcgataccgtgattaaaagcatgttactttcctactgacccgggatatggttcgctcaagcctcttacgggttcgagtcaggagctatctctcacatgtgatattggagattgactgcaaatagaggcatagatgaggtcagtggttacacaagcaattaacctatgcattatgcgtttcgatgcagtcgtctctttgttggatggatgcaataattgacacccaataatgggaatgtgattcgggagagaacggtgcactatcccaccggtgaatacttacgggattctcccaacatgtagatctatagttagatggactcatcttgagcattgaatccccgcactcccataccggccaaggggtaacacaaagcctatgatatcagtttaatatgagcattttgagacggcaatggcggttgggggtctagaattggaaaagaacggatatcgaaaaacagcaggatgttcgcccgatcaacgaccagcccgaaatgctccgttggagtaggaaaaagcatatgacgtcatggaagatgatacgcggtttgccttgtttgcaatatctatatgcacctctttcctgtttcggccgccgccgcttttatgagtagatatcagcactggctcaaactcctttttttcaaggttcctcttcattccagggacgggagttgggtagtcatggtatttttttcagttattgtgattgtgatggttactgtggtcttgagaatggtaaaaagtaatctgcccattttgtataaacttgggggtaatggatggtatacaagtttccgcaagacaagaagtcaaataggcaaagaaactgcggacatgaggtaaagctataaaccaattcagcaaatgaataatagatatatgctggcgttcgccgtattgatcaacttgaacgtgcacaggatgacacaaatgtgcccacaacgagatcgctgtacggaacctatcgtcttcttggctcaccattttctgcatcagttcgccgccttcttcatgatggcccacatgattttcaaagggggaaacgaacatttcgtggatgtcactggcagtaaccaaaggctttttgatgacattgcccatactgccaagcgggagagaaaatgctgtattaggaatagtcgtagggctaggccaggtcttcttgatgataattcccctaattccaatggggaaagcaatagagctgtgaatcatctttgtggaacggttcagactatttcatcatctttattaattaatatgacattcatcattgtctgcttggactattagggtaacccgagccttttgagtgttgcccacgatctcaagtgaggcagaagagcaagtgggaaatcggcttggtggtgatagctccttggatgatgttgactcgatcttgagcttggaaggtgttggcatctttcggttcgaattggataaagaactccagcgaccggggaaaacacgtaaccggggtcaatcgggcgtccaactagtgatggtatgttgggtagagggggatcgcatcggtgctgtgattataggggaaattgaaaatgcctgctgcttcccatacgtcaacctacaaaaacttattagcctaatttcatagattgaaggggaatcgcaccacctgggagccctctcgcgcaacggcctggcatatttggcgttgcaaagtattgcatgcccaacacttctccccagcaagccgcttgaactaggagcaggtaccgtattgccaaatcatactgtagtggagggaacccgttctcaacaacggtcaggtgatacaagtcttagattttaggtaccgctgttttgtagttaactagtagttaactagttagttatgtaacattcagaatagcactgataacctagaatctagttatacattcctctcatctcacgaattcgtatattacgttcgcccctttgaccattgcatgtgttgtttcaatccgcatacaccatatacattgcgagcaaaagcggcggaggtgagcactagaacggaaggggagtgctaagcattgccagatgtttgccgcgtttgcagcttgtaatgtacccggaaaaacttcggcccttcgcaaaacagctattcctccccatctgcgcttccccagcatatcgaccaaccatcgacaaaatgccacgaaagctaagggcggctgcccaggcggctgcacagtcgataagtgagttgatctgaatctcacgttggcccacacctgccacaaacatccgtcccttcgactatgctttgaatttcatcctctccttaagacgcgtttgcgactaaccacattcagaaaatgtaccttcaattccagatgggtccgatgaggagatggccgacgcgatttcctctcagccctcctcgcccgtagtcgaaccagaagactcccccgaagatcccgatgtcgaacccgaggctgaaccagaacctaaacgtgaaccagaacctgaacctgaagccgaaagcgcagaggttcaggcttccgaaactcctgccacacccaagcctgccacacccaagccagaggaagaactgagtgctgcgactcccgcagaagactcacttcttgccgacactgacaacacaccttcctacggacctggccgcccatcacttccgcctcgcggcaagcgtcgcattggtcgcccacccaagaaccctcggcctgaatgggatccggctaacggagatccaccattgcgagttactactccagtcaagagacgccgtggtcggcctgctgctagcgggggacgctgggcacgcaaccgcggcccctctcacctcacccaggtgcctgtcgacaaggaaggaaacatgatggacgtaatcaacgacgaagtatcgattccacctgacccaattggcgctactaaagtcgatgagaatggccacctacaaggcggacgcgagtatcgagtccgtacctttaagatccttggccgcggagaccgactctacatgttgtcgactgaaccggcccgctgcattggcttccgtgactcgtacttgttcttccagaagcacaaaatgctgtacaagattattattgatgatgacgccaaacgtgatttgattgaacgcgatctcatccctcactcttacaagggacgagccattggtgttgtcaccgcgcgctcagtgtttcgcgagttcggcgcaaaaattatcgttggtggtaagaagatcaccgacgactacgacgaagctgctgctcgcgagcgcggtgatgtggagggcgagttggtcgttccggaagaccggctgcccggacctggagaaacttacaacagaaatcagtacgttgcctggcacggcgcaagcagtgtttatcacacaaatgcgcccgcggtcccgcttgttggtggaaagccagttgataccaagaaacgccgtgtgccagtgactgatgataactggatgctcgagcatgcccgggctgcaaggtgagttgatgtttgataccgagccacacgttgggccgtggactaatacatagtatagtaactttaactccaagctcgccgaaatgcgccgtgccaatctgggtggtgtgtacgatgtgcacaccaatattatgcagcatccgaaaatcatgcagccaacccacgcccgctgggagcgcgtttccccggctccgacttctgtcccgaccgaattgacgacgaacatgaactcattgaacatctcaaacgaagcttcttcttccggccacgaaaagcagacgccccacgaaacccaggaatcgcgcgaggccaccacgggcgaaacttctaccgaaagccctgccactaccttttcccccgttcccacccatctccatgaccactacgtcatccaggatatcgtctacgaatccccgccatactcaaacatgggcatcccgggccctgatggtgatgtgcaagatattggccccaacggcctagtcagcgtcgccaaccccaagcatcccgaattcatgagtccagagatcctccagttgcttccgtcggagtgcaaggaagcgctcattgatgctgcaacacaggaggttgaatggaagaccaagtggaccaccgagaccatgaacggcgagcgtactcagccaaccaagagctacgcctggtacccgtaaaccctgtgcttgatttttcttttttcttggggttcttgcgagtcggcgaaatttatgggttatcatgggctggatggatggttggacatggcaggcgaaagccgctggagttattttctttctttctgcttccgagtctgctttcgctttctcaagatatgcctaggatagatatttgaccatgatgtattgactggtttttattccttttcggtcttcgaatgcatgtcgggtctacatgactgaacttggcttcgaatgatagccttctagataataacgaaccacatttttttttctacgatgacatgatgctggcctgctagcctttctgggaccttcgtcataaatacgttctctctctggtagcccttcgtccgtatcttctgactgtatgtagtagtacatggactaatgatttacaactaaatttatgatgcatatccaaagctgagagtttaaaattaataacttagcttacaagaataaataaaacaaagaaaaccgaggtcatctaaaactccaattgaaaaaaaaagcaaaataaacatgaacccaagagatcgagggagtcggcttgagaaagggtgttgaggagtggaacagccagataaaaaaaaatgacagaagacaagacaagacagatcggcacagacctcggggatacctaggtagtgtcggatcatatgtaaggagggaatggtagagaaacaagagagatagaggtaataaagaagagttaccggtacgtcagcaccgggagccacaggtggaaaaaggctgatagaacggctgggtcatgcatgcgagagcaaaggaacaaggaagagcaaagacgaggctgcattggtcgcgtggtaggaagtaagggaccgtcacatggccatttccgcgcgcaactttgccagctcggcctcttcgtcttcttcctcttgtgccttggcggggtgcttgactatagacaagtcgtcagtgagcgagcgatacatgtgataccggtgtatatggttccgttccaacttacgatctgtattccccgcagctggtagccggtccagttgactgcccacaggtacggtcccggtgtgaagcattttcgcgtccatcgcttcctgctccagaccctccaactcggcatcgagctcttcctcgtccgcctgctcgccgatagagaaactggtaatgacgcttccgatctcggcgctgagggcatgctgctcttggaggccctccctgcgagttattagtaagatggtaatacaagaatcgcgacagggcgatatgatagataagggtaaaggtattcagtgagcccgccatcaacgtacatcgtagtgtcgacatcctcgagcttcattccaccatgaatctgcttcatagcggcacctgcctgcttcatagcagccaaggtctcgtggttgatattcgcggcttcgatggagtatatctgctgctcgagttgcatactctgagctgttgtctgctcgagagtcttctcgtggatctttttccgtcggagggcatttttagcggctattgaacacaaagtaaaaagagcaatagttagccaaaactgcaaccttcaaatagatgcctagcgacaatctgcaagatccgcagtcataccattcttatctgtgttgacgttcttccgcgctatagcctcctgttctgagatctggctctcgagatgcctctcacgtttctgcagcatatcgagctgcctgcgcaaatttagaatagcctccttgggcatatctttccgcttctgggcggcggccccgccaaaccaagaccacatggtgatgtcggtgactgtgtaactgggaaaccgaatggaaaaagtaagcaggatagaatccggtggtcaggtaatagctaggtaatatgtccaaggagaccagtggccgaaaatctggagtgagtggggagagaagagtagattggttgttttctttgctgcgagtcaggtggagcgataggctctaggcagagccagggagccgacagacgaagtaagaaaagggcgtaaaatgacctccgaatgagcagggaatctgaagcacacgactcgtcgagagcgcttccaaggataatctctggatgaatgcaaagtgtggaggggaaggagcccgactttcccctcgctgaggctagttatgacatacacggtaaggttagtcacgtgcgccaacaagaaccgctctatagcgcggaagaagaacgtcatgtttgtggccttttgatctgtctcttattcttttctttcaatattcacacttttataatgttgagcatcttcttcaactagcgcagagatgaatgggccgcgcccctcgactcgcgtgttcctctccgatctctcgtctctacaggcggactcgaaggtccgctttcttggctggtgcgtcaggcccagagcgaagaagaaattgtataaagttgaggctttccaatactaacgatgatctacgttcttgtgtacacatagtgtgttatattataacatcaaaactggccatttgatactggaacacaactatccacgcagcaagatagctccaagctctgtatctgtcgacatcaatcctctcctcgaggacctgaccgccgaggaattgggcgtggggacatggctgaatatcgtgggctatgtcagagagtcggagccgctgccgccaccatcttcattctcctcggacgcgaaccagccgagccagaggccttctacgtgcccccctcgtccggtgtatgtcgaggcaatcatggtatttccggccggagctattgccatcggggagtatgagcgaatcctttgcaattctcagcatgttgagcggatgatacagttcaacaactaagaaaacgaaaacatccgtagtggctgaaaagatgacatggaactaaagccaatcacgcattaatggagcgtctctgcattagatattttgctatgtaatcacttttcgagcacctcatatacaaggcgaggggtatcaagacgtaaatcaaaacaccaggccaaaaggcctcagaaggcaacctaaaccgcctcttccactttcttctcatctgaaagatgcacctgctgaagctgaacctgcctcctagcccgcttcccctccagcttcatcttctcctcctgcatgcgcagaataaggggactcttcatacgaatcttatgcccatacttatagaacacaaacggaatcggcacgatcacgacctccaacaaccccaacagagtgcccgcccaattcggccccagactggcgtacatagaagatccagcaagaggcagaacaccaccgaggatactccgaataaccgagttacccgctaaagcagaagcagcatacatgccgtaactgtgagtcaggtagttggacgaatagatgaaaacaccggtgtttccagcgccgaacggaatacccgcgagcaggggcacaatccagggtatggaggctggggagcaggtccatgcaaaccagagctcgccgactgggatcaacgctgcgcagatgcagacgaacgagaccattgcctcggggtgtaattttccggtctcggggtctttggcgtggctattgattagtcgccggattaagggttcgcaggcgattgtgaggacgacgccgatcccgatgcctaggaaggcgagcccagaaatgcccagttcccacccgcgaatgtctcggaagacgattgggtaggctacgaagcagaggtacaggatgccgtagatgattgcgatgtagatgttccagaagatgctgagcgtgttagaacatgcgatgtgggttgctgctgggtatgtaagtgtaagaaactcaccagattggttcggtgactgccattacaaatggccggctgaggttcagtttgaggatttcagcaaggctcgccttttggtcgtatcgactccaccagcgggaatcgccgctctccttgcgcattctggctgctttcttttggagaatggttggtgcatatgtttccttgaggatgatagcaaagaccaaagcaatagcggagagcatgagcgcgatccagcacatccagcgccagccaagatattcagtgacgaagcctccgataacaggaccaatgactacatcctgttagagatggactcgttatatcagaaaagagaataagggaagaacaaacctggtccgttgagtggcccaatactccaaacagagattgccagagcacggtgctcatcatccaccaaatcagccaccataccgggcgcggtagagatcatgacactgccgaagaaagcagcgatgaagcgaatgacgatcagtgccgtgacggacttggcgagtgcgcaggggatgatcaggactgtgaacacggcaagacaaattacacagacaggtttccgtccgtagacttcgctcaacggggccatgaacatggacccgatggcaagaccgaacagatagaaggtcaagccaagggtgacgataatcctggattggccgaattcctccgccattaatgtgatacctgatgtataagaagttgaatataacacgcttccgagtttgttagctaaggaatctcgcgcttccgaacttcaagatagaaacttacacgatgagagtattccatgatagaaacacgatgcccatggacttatacttgaagttccaattcttggggttctcagggtcatcattgccatcccagtcgacttcatagtcggggtcagcggtggcattggttgcgattgtcgttacacgctccgacagtgacatatgcgaggtccgcgaggcacgagctgtcaatgtctttcctagcgcatcgcgctcgatctgtgcgtctatcgtggaaattgactcgatagagtctgtgtcttgggacatcctctcagtgtgttcgggccatttatcttggccctccaaattgaagtcctttgttgccattccctggacgaagggctttcaaaccaatgaaacagtaccgggagcttgggtgtgtaccggagatcaaatggcaagttactccaatattaagggtcgcagttgatagaataggagaaataagagcaaagaatccctctattttcgatttcagccccgaaataaggttgtagaagtagagtgtgtcgctctctccttttttttatatagagatgtggtggaaaagctgcaaatcctgaaaccgaggttgctttatcaacagcaagcctccaaactgacacagattgtgacagaagatagccctggagaaattgaaggcatttatcatcaaaacacttggaaggtggggctgaaagtcattgataagcatattcaaagagaatttgctaggctcgtagggcgtacatggcttgcaggatttgcgatatgccgagaagatgatctatagcccagaaaaaaaaggggaggatacttacttttcctagtaccaaattgtatataactatagggtaacagagcatcagatttcccttatatccctataccccctatactactccgtgcctggactatgtcctacaagcccttggcatggatttccccatgggcaaagcgatttgccatggcgtgatatctccgcaaagacagaacttgtgtgttccgacccaatttgtctccacacggcctattaggctcgaaagagtgcaccatgtgggttctagcctgggctgtagcgtgccggtttgccgaatactgcctgtgagagctgtgcaatatatactgagggtgtatttctcatggcataataataataatcattccatgtatactacttcgaccttgaagtataaagtagatatcaattttggtccagatcaaagtgggctcgcgtggaaccgggaaaaagcgggttgtgaagagaatgaaacatgaatgaaacaagaatagaaacttctatttcgatcccaactggttatagtcacttttatgtatgtacctatacgtaccggatattccctggcgggtggggctttcctatttgagctgccgccgcttttatgagggtgctcaggctcaggctcactgagtagatgtcagaacgggctcagatcagtgatcatgctcagatcagtcacgtgcaggatgactgatgctcagtgagtgctcagtgagtgctcattggatgctctctgattactcagtgatgctcagtgtccaatcagtgagcaacactgatgcacatggggatttcctatttgagctgccgccgcttttgtgagggtgcttaggctcaggctcactgagtagatatcagcacgggctcagatcagtgatcatgctcagatcagtcacgtgcaggatgactgatgctcagtgagtgctcagtgagtgctcattggatgctctctgattactcagtgatgctcagtgtccaatcagtgagcaacactgatgcactcagcccacctcagaccttacccagaagggattagcccccacagggtcgtttatactgtgatagttagttcgttgaaagcattgttgctgccctcattttccggagcactacacctcatcaagaaaatacattatgacgaaggggcgcaggaaagagcggagaactccattcgtttcatgatgtcttccttctgtcttctaattcagagcggctcgagctcaaagtcccaaatataaaggcagaccgtgtgccagcattagcatgtaataaccaacacgccttctattcaagcgccttttacttggtacattaatctaatatcgcattattttactttgaatacatctcctacctccaggttgcaccgcacttgattatgggcagaaaagtcttttttgccaagcgcgatggaatcgctaaggagaggcgccgtctacagcgagaaaagaatggttatgctcctggggtccatagagaggaggactcaattcgagagaaagacaaaaggcttcccaagaccaacaaattacatcaagaaactatgaacctctggctcgagtgagttaagccgcatctgaagtggcaatccctttcctattatgaattctgctgatcttcctttagtttcactgcaaacccggagaatgggtttgaatccacctcagactatacccggaagggattagcccccacagggtcgtttatactgtgatagttagttcgttgatagcattgctactgccctcattttccgaagcactgcacctcatcaagaaaatacattatgacgaaggggcgcaggaaagagcggagaactccattcgtttcatgatgtcttccttctgtcttctaattcagagcggctcgagctcaaagtcccaaatataaaggcagaccgtgtgccagcattagcatgtaataaccaacacgccttctattcaagcgccttttacttggtacattaatctaatatcgcattattttactttgaatacatctcctacctccaggttgcaccgcacttgattatgggcagaaaagtcttttttgccaagcgcgatggaatcgctaaggagaggcgccgtctacagcgagaaaagaatggttatgctcctggggtccatagagaggaggactcaattcgagagaaagacaaaaggcttcccaagaccaacaaattacatcaagaaactatgaacctctggctcgagtgagttaagccgcatctgaggtggcaatccctttcctattataaattctgctgaccttcctttagtttcactgcaaacccggagaatgggtttgaatattaccaaacctcccttggttctccggctccaactcatgagatgatcaaggcgtacattcgctggtacgcaagttctactcaagggcgactgaacgatgatgggctacctacggtaagaaccgtgagtgcgcatgccgaacagttctttggtggatttgaacaattcacaaaaattaaaatcatcccagacgatcgaaaggaaataaaaatggttggtttattcgtaacttcctccctgagaccatcataaactaacatcgatgcagtggatcaaaaaaaccttgacggcagatggcgtcgttgtagatcaaaagaaagagaaacttaacttcacaaggcatgattttttgagagtagtctcgtctttgtggcagactgatcaccaaacgttcattccgggactgctcaaagttgtcatcttgtttgctctccagctgttcctctttactggagcaagagtcggagctttcataccctctagtgaggacaaacatgaaagaggtcttcgatacgaagtaaggcgtctttactccaccgatattatacaacattaatctctatcctagcatatcaagctggttctgtttccttcatccacagctcgttggacggtgggttggaaggtggatcagaaatggctcaaaaatcgtcgatgtgaaaaatacacagtgtgagttagaaggacctagtgttatatttgtcaaacatacggggacttcattaactagtgcctctagattcggaattggtatccgggacagcaacaggccgcaatttgcgtcaggctaccttcttttctctcttgcattagcgcacggtgctatttatggggtggataccgtggatgatctagcgcagtttgatctttcaaatggcgagattcatttgcgatggaaagaagagtacttggataaaccagttctcaggcatgccacggctgatgggcctcaggagacacctttgacgaaacaaaaattttgttcttgcctgcgtcagatttttaatgctgcagggtactttggtgaattggcaactatccattgtatacgacgaggccttgggaaaaaaatcgaaagtaagcccctgaaaccacacaaaacaatcgatagacactcgagagagctcttcatactaagttctttacagagagaaatggctctgcacctgtcagtcaaattatggggcatcggggcccaggcacctttccggagcattatcaagcccactgttcctccatagatgtagtgggagccgttctagatgaggaagaccaatccgatcatatcgagtactttcaaggttatgttcaatattacgaacgtggcttgccaggcgagttgccagcagagatcaaaaggagtattttggaaaaaccagatatggtggaaatgagagcccagatcgaatcattcgcgcagaaccacgacgaggattccctcaagaacatgaatttggaatacaggaaggcgctcgttcggcatcgcctgttcgaactcaagcaatatcaaaatcggtgggtacaggagaaaagagaccagaaaattatcaaccgaggaaaagaagagccgactcatttggaaaatgacattcgcacacgtgctcaaatgttgattatgcccgaggttgcgcgaatcgcaacagccatgtcctgcaccaaagagctttcctttgacgaaaaacttcttcttgttcaagatctacagacgcagtgtgcccgtgattttgatgtggtatacctcccaaatcaaagtccggttcatgggctttgtcctgcaaaagggtgccatatcagcattgcaaggtgagtgcctaggctgaataatgacatggccaatactaactccgctagtctgaggaagtgtgatagaagtgcccacattcacggatgtgttcggcgtgagaaagcttctgaccttcaaatatcagaatcagagatgcggttttgctatgaatgcatggaatggtttttgtcgagtcaatggcggaagcattgcgatgcccatctccagtcatggcaaatccagcactgcgaagtgatcatctatcgccataccgtcattcgcccgggctattgccccttttgcttgtgggacctgaacctgaatctctccgcagaaacccgtttgcgatcctggctgcgaagtgacaacctgagggaacacattgaagggcagcacatggctgaaattcagcgtttcaagaaaaagccgatatgcggatgctctcaaatctttaacaatgagcgtgaccttcgaaatcacttacacgatgcgcatgggctaaaggaaaccatatggcaagaaaatccaaagctacccaacaaaaggaagcgcacttgcaaggtggagtcacaatgctcttcaacagaaccaggagaggagcatcccaagaaaatcagatttcatcattacacacctccgtgccatgagcgtgagcacgtgccagaagaatcatttgtccccgtcccggccttgcttccgtctgtcgaagagaatctggaacaatactcggggccaagtatgtgtgacaaatatagcacgagcagcagaagcaactcagtagaactatgcttcttggaggcaagtcccccacccagctcggggccaacaactccaggtcttgaggtcattgatcctcgaatcctcgaacctcctaaattcaacagcgacaatgcccgtcaatcttgtgacccagttgtcatccagccaaattccctcactttcccaccagaagaggatgaggccaccaaaatttccgtcagtggcataacacagccgcaacctcccgctctaagctttgccagtcagccttctggatactatgctgtcactgaagccaatgagaggaaaggactgcaatgtctcacctctttgtcaacctgtgaccaacctgttactgcggaatttgagtgggagagtcatccacttacacggagagaaggcggcgagggaaacctgtctgttgatgatcaagcccctcccggtggccctcgcagaaccctcactagatccaaggcacaaactcagtcgccccagcatcattcagatagtttgaacagctgcaagccccggcagaggcttaatgcaaagaacaaacgaaagttgcgtgacctacagagacagaatctgaccctgagacagatcgggcctcatttcgcggatattgatatggcgttactgcgacaggcttggatggaattgaagccttctcagagatgcaccagatctcgggccaattgaaagggcaactgaatcatattttcaatcaatagtatttcacttgtgcttggttattatcagtctgtacaaaatttgctattcagccgcgtagtccaaccctcgccgacctaactagactccttgtcacaccatctgaaagttcctagctgtgcgagaataagggatcagttagaaataaatgactcaaattccggcaggatcgcgggctcgttctttaaagagtaaacgcgatgtacgttaaactcgaggggcaaacaccctacactttcagcgcacaagttcgaagcatgatgagcttcctttttaggtgggcccgcggatagccctttaaatgatagtcgagttcttatttctagtcgtatttgattgggcctatccggaaaataactgcagtgggcaacatgtaacagaccgtgaagactagcaatgcaagcaacttggtggctgttctggcgaaagcccaatacagccagcttgttacatggaaacagacagttacattacagttacataatctgcaccgccacagacgaacaagaaaacttagtaagtaattattgagtgtaatgtaacgtaccatgtatgttttaccttgtattatattacagctgctaagtattcaatttctagttatagttggcctgtggacaaaattgatataaaaaagcgtgggaccgatctacgagttcaacatgattacgtagaaacttgctcgtcccaggtgagtaacatgcgctcctaagaacctattggcatccagaaactctctgagtactcctagagaccagcttcctgccccaggagcgccgcatcgttcccaggaaccaccgagtctcccgggagcctgatacaagctcctagggcccaattctaagttcccgggagctcaggggctcctgggactacccgtgccgttcctgggagcattcattcggttcctaggagcttgtatcaggctcccaggagactcggtggttcctgggagggacaatgtcgtctgggaatgactagcgacaaataaagagcagaaaacagacttattgaactctaagccattttcttgtcatgacgttggaacctacaacacagagctaatctagcaagcaccgtagctggcaatccgggcatagggtcagttgaagtcccctttgttcttgcacgaattctagggatacagggtcaagggatttattggtggacaatcacaagctttctatcgtcgcacactgaaattgcaacattgtgttgatacaaaactctgaaacgactttgatttaggtaatagatcgcctccatctgtttacagtctgtttcttgcgggctcaggcaaagtaatgcactgcctgcctttcacataatcccgtttcagaacggtcgccgcaacaaaatgatccttcgcatgccctaatccacaggattgggcattctagccccaatggatgtagtaccttgttcacctggccatcaattatggcgtcattgatattctccggaaacctcttctttcttcctgttcagagcctcgctggtgaggacctcgaaagctggtaaacccgaatacctagagtgcgaatggtgaccgggcaaagtttgtgacttcaacagtaaatctttaactgttccttccttctggttgtttggggtggtgctgtctctcttttgccagttggtactcgagttccctattcttgagctctaggttgcaagctttttgttgagctatcttgatatattcaataaaacactggttctgcttctccaagccggctttgtccactgcgtgggcccgtaacatgttgtcacagttttgtagcataacggttgcctcgtagtatttttgttgcatttttgacatttcagaatatatactcgtaatgattccctcgagcctttgatttggatgttgcatgcctgagacaagttaattcggaactttcatggtacttcaatcccagactgaccttgataaacgattggtaagggggatgggctcgggcggtccgacgccacacgtcttctatgtggaggcatttttgatcggttttggcttttcggacgatttaccacttcttgtaggagaaataagataattgtcagatacagtttttcaaaggccaatggcctctatttaaaatatttttagagggcttatgcattgctgacgttcccgcggtgtaaacgtcggcctcatcggtataagatcgtctactttggatgtcaagccacaagcttctgggatcgtattgcttgctcttgggctgtgagggtctcacgtatacgtgaatgaggacagcgtcttccggatgaataatcaatatcaaggaaatctatagtcgactctagattaaagacgtagcgcgaggaagcttccgcgtggaggggactccatatgcaccatgtgggtccagcagatcatatctcaatttagcttgtatgttatatgtataaccctggaaatacgatgcataactcccaggaataggtgcgtgcttcctgggaacactataacatatcccgggatccttggggctcctaggaaccagccgcagaatcccaggagtaagtatcacgatcctagaagccggtgactcgacatccacttttaaatatatccgtatccatgatatgccctccaaaaatatttaaatagaagtcactgcctcaaagaaatgcgtcttcaaagctcctcagccaactactgggggtgacagacttctctctgaattattactcttagccatccttttattaccatctgtataggtagtcgttacctatacgttcacaaaatctgccaagatgccgcttttgggacttccactagaattacttttgtggattggcacgtccatcgacaagaaggaccttcgaagtctgcgtctcacatctcgagaatccaacgttgtcttcacaaaaagcctctttgattgcatagacttccaagacaccccgccaattcattgggcaatcgagcatagaaacttaggcatcatccagcactctctgggttgggaaaaggcagatatcaaccaaccgttttctggccttacaccgctcatgttggctacaaaattgcggtacgcagacgctgttaatttgctcttaagccatcattcggtgaaagtcatacagcgtaatactttgggagaaagtgccttctcgatcgctgttctgcatggaagcgtgaaaattgtcgaacgactcctcaatgtgcagaacattgatctcaataaccaatccctggacggaaatgcgcccatttcaattgcgctgacctgtcaccaaacctacatcttccaacttctcttgtctgatgagcggacaaatgtcaacatctgcgaccatcatggccaaacaccactgcacctagcgacagaaattggcgattatggagcaatccaaatgcttgtacgaaatccgcgagttgatgtcaactgtttcaaccaccgacaggaaactccgttgcttctggctgtcaaaggacacggtcgttttctccccatcaacaaaagactactcatcgttgaagccttgcttttaagttcatgcatcaaccttaattatcaagatgagaatggacgtaccgcaatctggtatgcagtgaacaattccgacataaaactggctgagctcctcttgcagcaaacaaatctggacctcaattgcaccgacaagctgggtcagacacctttggcaaaggctgctgcaaatggctccttagacttgatcaaagtcctcttccgtcagccggggcttcataaaagccctcaatctgccgatgcatttccgccgctctggtcagcatgtcgcgcaggacaattttcaatggtggaatttcttttacaaagttcagccgacattaaccaaaaaagtccatcggggacgtcgccacttcaggtcgcaataatcatggagcacgtcgacattgtccatctccttctcagctacggagaatctttgttgatcaatgaccaaggccctagctcctttactgcgctcatgtttgcgtcagctcacggtaggtttgaaattgccgaaatattattggagcatcccaacataaatgtaaatgcggtggacgaccaggggagaacatctttctggtggggtgcggctggtgggcatttagtggttgtgcatttgttggccaatcagcgtggtgtgaaaaagcgactgaaagattcaaatggccagacggcgtatgccatcgccaaggaacgcaagcatgggcatgtcaaggtttatttgcgaggcttctagggttcagctagtttatagaaagagatttcaattgatgtgttcacggcgatcgggttctctgagtgcaatacggtattgtaacagcagtcttttcaccgcggcctgttgtctactgctcatcttctctagtgatcgataccaaggacagatctgacgagcccatctctagtctagagattagcagtgcgacgggcttgtgctaatgctaactaaactggaaggaaggactgatctccatctgacgacatataatattagctagcttacgttgacaggaagtacacaatcaagtgattgaattaatcagacgcacagggttagcgggatacgacggtccgccacctgcttctgcgtcgaggatacgatcgttctctcggcgccatcgaatgtaaaatcatctctacaaccaagcaatacccatatctaaaatttgccaatggacaatgagatctaaacaccatcgaccgatggatgaacggccttgatcgaagccatgagtcagtcaacaacttaactcggttctcattcggggatgcagaagatgttattgtaagctgtcttcttgaagttcattggaaaaaggttaccgaagacttctgttgcaagaacgctctgcctgtatttgatggcctttcgctcacctgcacgtggccaagaatggcgaaattccgcacgaccagagcttcctctttggacgaccagttttgaccacactcattcccagattcctaaagcacaaccgccgcagactcttccccactccgatagcacaaccttaaagtacacgagtcttgattccggttcagcttatgaaccgccatcatctccaccggattctccaaaggcagtggctcaccgagtgcctacaagatctcagaccagctgtgcaccctcggctgtacagcgtcgctcgcagtcgccagactcatcaggctccaattcgaaccaagcaattggccacaaacgggcttcaaccaagttacatcctccccatcttcccaacgagcaggtcatcaacgggacgcgggaaataatcaaggcaaccaggcccggtatcacgatgcgcaattttgcacccaacgatgtttactcggattgcagtctggcagtgtgttagatgactgctgtccaaatgtgatgctccatcatcgaagcaaagacaatccccagcatccgattacctaaaaagatttggtccgtttacttaatgcgcaactggacgaaaacattgaccgatgcacacatcttggcggttgtggggcatactccgtttgaacttgcttgtgttgaatatggctacactgttattggaaaaggaaccacatcggggctgtggaaagaagtctcccgcgaggcgcaggtataccaaattctgcggaaggcccagtctgcaaatatagataaaagccgcaacaaacctgtacacacacacacacacacaattcattaacgcccggcggctgagccgaaagggcaactatcactaatctaccagtacatgcatatttgaacatttgccgtgtctccttggagcccatgcggtatttcctgccgtctttgacattacagtttccaatctcataactggtccctgtgggttagtattgattagtagactggcttgaaggcgcttcttcaagtgttcaacatcctatcctcggcagttgaagcgcgtccaccgttctcacaaggtgttggggttagtaggggtaaagtattctatctgcgttcgtcggcataattaggtggccccgagtcggcccgtagcgatggcaaaccgtattgaggctcgcactgcttccaaattcggcgtccacttttgaccatcggagggcgacttcccacccaagaagaaggacatgttacttcggcgagtgtgggtacattgcagcatttctgtccggtgcgcggtccacttccgacatcgaaagagaaagtggtccacggtctctcttgcttgtccacatgcacattgatctgtctcggcagcattgattcgaaagagatatccattgagtcttgccatgccagtccggagctgggccaacacgctcgcttctttccacgataatcggtcatacagctgtcgcgtgtgtttccctggaagtgcggtatccactcggctggaatgtcttcctatgtcctcaggtagcttcctgctggggattgcttgggcacgcgcaatcttcagagtcgtcgatttcattttggggacctgtacttgcgagatagcattttcttgcgtcgcggctctcgcgtgctctttcgccatccctagtagtttgttgtcttcgctagtggggacccaccggacgctgatctgatttccatgcctctgcaatctgctcatcagcttgtagctttggcagacgaattcctgacccgactgttgtcgcgggttcttcaacgtaagagccgccgctttgttgctcgtgatcagtgtgatcctaaagtctttcaaccccacgagtgtcttcagtgtatgcgccactgccgccagctccgcggaaaatggattttgctctgttctcgcgctcaacgtgacggacaaggtcttcagtctcactttgcgatagcgtggtgcagatataatattgcattggtatactaagatctagtctgttctttaagccaatacaacggagagatgggcaaattcccccccatgctttcccagctccttatccagctcactagtactctcattcctagatgtccgcagatcctcttgccttcaagatcttagcctttggggttccagcagagccaaaaaccttcccccacactcatatacccgtttgctccttaagcccaccctccaggccaagttgcagctctgctaagtccccttagggtcacggcataacaaccttcctgcttcttgtgaaccgacatgcgcatccgtcctctcgggctatactgacagtgttgtaaggatctctagtcggcagccgatggcgacgcgccaaccttcttcctagccatcgttgccatagtatacctcagtccacaagttggcgtgatttcttgcttcctgatacctagtatcctctcgttctctaggccgaccatgtcttgcagatggtccctttatacacccaagcctgcagcgtataatctttccatccactaaccagagtatcctccgattcgaggtaagggagccagcagccgatggcgatacaccttagccctaatcccacaaatccaattctaccccacaggtgtcctgctcgacttcgatccgcgcctctgagaggctctgtgaactccccttggggtgacggcatgagaggctgtaaccgttatcgtcggatggtttttaaatcgttcctatgtgccaaaggggcctcgaggtcgctagaattgcggtggaggcaggccgcaacatcgcggactcgtttcctctggtcgtcattgcgtctctcattggctctggagtaacagagactccaggttcgtagcccacgcctcgtacaggctgagaaatccgatttcgtgggcccaaacctgtacacttccccactcacgtccttatttattctaaaccgactgttcttaaccgactgtgcttgaccgtttgtgcttgaccgtttgtgcttgaccgtttgtgcttgaccgtttgttcttgattgtttgttctttatttttattcaccaacaattgctggctgtttaacaactatctgccgtcaaccgttcaatttttaggtttagttataaaggtgttatttgagaacatctatgtcagaaaatttgcttgaccgcaacctggccgagtcagtggtaaccgcagccccacaaagcaattcgcgataataaagttcgtgttaagcagctgtagcagtgcaacaaacaaacaaacaaacaattcattaacgcccggcggctgaaccgaaagggcaactatcgctgatctactgtacatgtccatctgtacatgctgtgtctcctgaaagcccatacacaaaaccttatcacatatgacattttcaaaaagccgtgtcgcagcgagtttctcgtgagttagtaagtgggtgagtagactggcttgaaggcgcttcttcaagtgttcaacatcctatcttcggcagttgaagcgcgtctaccgtgtgtggcacgaggtggtgggtgagcagggtcggaagaaggggtgggggttatgttcgtcgatatgttcaggtggcctcgaggcggcccgttgcaatggcgaaacgtatggaggcccgtactgcctctaggtttggtgtccagttctgatcgtcagaaggctgttttccccccaaggcgagggatatgtttcctcggtgagcctgggtgcattgtaacagttccgtccggtgtgcagtccacttccgacaacggaagaggaagtgctccacggtctctcttgcttgtccgcaatcgcattgatccgtctctgctacattgatttgattgaggtatccattaagtctagccatgccggtccggagttgggccagtacggtcgcttctttccacgtcaggcgatcatacaacagccgggtgtgtttgcctggcagtgcggcatctactcgtttcgcgtgtcttcctatgttctctggtagctcactgtaggggactgcttgggaccgtgcgatattcaatgtggtcgacttcatccgcgggacgtgttcctgtgggagagcgtcttcttgtgttgcagttctggcttgttctttagccagacttgacagcttgttgtcttcgctggtgcggatccagtggattttgattcggtttccattcctccgcaaccttctaatcaacttgtagatctgacaaactagctcctggccagactgtcgtcgggggtttcttagcgtgagtaccgccgccttgttgcttgtgagcaacgtaattttgtagtctttgattcccactaccatcttcaatgcatgtgccatcgctgctagctccgcagagaacggattttgctctgctcttacacccaatgtgacggagagggtcttcagtttcagttttcgataccgaggtggttgtttctcgatcgccacaccgaatccgaccagctcgttccgagccgagctgctgaccgcgatctgcatatacaggcctgctctggtctggatttcctgtggttggtccatatcaggttgtatgcgttcttcccacggagctaacatagatggattaattgtttccagtgtttccatgtcgatatgcttcagcgcatcggctacccggtacaacggcgagcgatggtatcttctgaacttcctgatccggtctgtacccctgcggagggggttggtttcaggcagggtatgcatgtccgtccacatcttcacggcccgtctccagaatcgttgtcgtgtggtggtacttcccgaaactggtgtcaccacctgcactcttcgtttgattccccaaccctaatgccaagatcctctataccgtattgggaatagacccgaagtatcgatattcctgttagattacctatacgaccctttacgccaagtgatacatactaagctcccaggaactgttagatccccaaattacatgcatttttataacccagcgtgcccggatctccatcaagataactttatctcctaattgagcagagggtatatgtatgccctcgggaggtctcgaggtctggccagatatccaactaaccaggcaagcgtctctttagtttggcttgtttgtaagaagttgctgctcaaataaataatagactaatacgccattgatttttatcattgaaaccgaatataaaatactgccaagaccggggatcatgaactttaataggtatagcgtgttttgaaagtggtgaaattgatttcaatccatcctgtatcaatttcgaatttcactgcacttgttagtgaaacaaacctccccgcttcccctgactgttccttccgatctctgagaacgtgagtgtagaggctataagagtctgccggccggcccctcaaaagtttaatctgagcaaccacgacccctgaattatgactgccacttcaccccttaaccccgcgaccacggcccagtgcctcttcatcaagagtgacgatatgaaaaaagcatttattcatctacccgaggagttactcttcctgattgcaagttttctagagaaagaaaaggacatcagctcgttatctcgaacttgccgaaaatgctatcttcccctcaactccttcctctatcaccacaattcgttgctaggaagttccgctttgctatgggcggcccagcgggggatggaagtaacagctcgtttctgtattcaaaatggagcccatgttgaggttactgatatccacgatcacgacagaacaccactattctgggccgcgtgcaagggctacgaggctgtggtgaaactcctacttgagaccgggcgggtcaatgctgattcaaaggactcccacagcgagacacctctgctcgcagccgctcagaacggccacgaagcggtggtgaagctcttacttgatactgggagcgttgatgttaattcaaaatgcgcctacgagacaccgctgttccgggccgcgtatcatggccacgaggcggtggtgaaactcttacttaaaactggacacgttgatttgcagccaaaggacgacccctttggttggacaccgctgtatgtcgctgcatggcatggctacgaagcggtggtgaagcttttacttgcgaccgagggtgttgacgcagattcaaaggactccaacggctggacaccgttgttgcgggctgcgcaggcgggccacgaggcggtggtggaatgtttacttgagactgaacaagttgttgtgcagccagaggaaggccccggcgattggacaccgctgtccgtcgccacgcagaatggccatgaagcggtggtggagcttttacggtggagcgagtggcgaagcttttggaatcgagcaggtcgataaatcaggaattcgtaaacaatataaacgggcttgaaactcgcattcccataaagattcatgctttaaaggggctagcttggcgccatcttggcgtgatcactggtgattgaatgtgaaaaccaacctctaccaaggaacgaaggcttccgaagtggtgccaattaggtcgacttacagattaatacagcggctaaatatccagattactctatgtaagaaacaatacacggcccactaacaaggatactccggaataactcccaatatagactagtctgtcttggcagttagggtttgagaaacaatcgaagagtgcaagtggtgacaccagtttcgggaagtactgtatcgcagcggtaccctatacactgtaccctatacagtttcgagaagtactgtattccaaggacatactcgagagatagagagaccggaccatggggatgaccacgagaagccagccatctcccacccccgaagccgcaaaccccacaatctcacccgaataccccaacgttgaggacttttctctcgccgaggatgattctcatgatgaggacgattctcacgtcgaggatgattctcacgatgaggattactttctcgtctcaatcacctacgactactccaccatcacagcccgagctcgttcgttccaaggaatagtgcttgctagggccactccgctccaactggcccagaatggcttctattaccgaccttcaggagtcagcaatgtggcatgttgttttgcctgccaatcgaccaagcatttatccaccttccaatgcaccccgttcgaggaagtgcaacaactacacgaggaagactgcatatggcagataatctcgtgcgatttgaaacaccacctcggaactcccaacaaacccccctcctcaaccaccgcattccnnnnnnnnnnnnnnnnnnnnnnnnnnnnnnnnnnnnnnnnnnnnnnnnnnnnnnnnnnnnnnnnnnnnnnnnnnnnnnnnnnnnnnnnnnnnnnnnnnnnnnnnnnnnnnnnnnnnnnnnnnnnnnnnnnnnnnnnnnnnnnnnnnnnnnnnnnnnnnnnnnnnnnnnnnnnnnnnnnnnnnnnnnnnnnnnnnnnnnnnnnnnnnnnnnnnnnnnnnnnnnnnnnnnnnnnnnnnnnnnnnnnnnnnnnnnnnnnnnnnnnnnnnnnnnnnnnnnnnnnnnnnnnnnnnnnnnnnnnnnnnnnnnnnnnnnnnnnnnnnnnnnnnnnnnnnnnnnnnnnnnnnnnnnnnnnnnnnnnnnnnnnnnnnnnnnnnnnnnnnnnnnnnnnnnnnnnnnnnnnnnnnnnnnnnnnnnnnnnnnnnnnnnnnnnnnnnnnnnnnnnnnnnnnnnnnnnnnnnnnnnnnnnnnnnnnnnnnnnnnnnnnnnnnnnnnnnnnnnnnnnnnnnnnnnnnnnnnnnnnnnnnnnnnnnnnnnnnnnnnnnnnnnnnnnnnnnnnnnnnnnnnnnnnnnnnnnnnnnnnnnnnnnnnnnnnnnnnnnnnnnnnnnnnnnnnnnnnnnnnnnnnnnnnnnnnnnnnnnnnnnnnnnnnnnnnnnnnnnnnnnnnnnnnnnnnnnnnnnnnnnnnnnnnnnnnnnnnnnnnnnnnnnnnnnnnnnnnnnnnnnnnnnnnnnnnnnnnnnnnnnnnnnnnnnnnnnnnnnnnnnnnnnnnnnnnnnnnnnnnnnnnnnnnnnnnnnnnnnnnnnnnnnnnnnnnnnnnnnnnnnnnnnnnnnnnnnnnnnnnnnnnnnnnnnnnnnnnnnnnnnnnnnnnnnnnnnnnnnnnnnnnnnnnnnnnnnnnnnnnnnnnnnnnnnnnnnnnnnnnnnnnnnnnnnnnnnnnnnnnnnnnnnnnnnnnnnnnnnnnnnnnnnnnnnnnnnnnnnnnnnnnnnnnnnnnnnnnnnnnnnnnnnnnnnnnnnnnnnnnnnnnnnnnnnnnnnnnnnnnnnnnnnnnnnnnnnnnnnnnnnnnnnnnnnnnnnnnnnnnnnnnnnnnnnnnnnnnnnnnnnnnnnnnnnnnnnnnnnnnnnnnnnnnnnnnnnnnnnnnnnnnnnnnnnnnnnnnnnnnnnnnnnnnnnnnnnnnnnnnnnnnnnnnnnnnnnnnnnnnnnnnnnnnnnnnnnnnnnnnnnnnnnnnnnnnnnnnnnnnnnnnnnnnnnnnnnnnnnnnnnnnnnnnnnnnnnnnnnnnnnnnnnnnnnnnnnnnnnnnnnnnnnnnnnnnnnnnnnnnnnnnnnnnnnnnnnnnnnnnnnnnnnnnnnnnnnnnnnnnnnnnnnnnnnnnnnnnnnnnnnnnnnnnnnnnnnnnnnnnnnnnnnnnnnnnnnnnnnnnnnnnnnnnnnnnnnnnnnnnnnnnnnnnnnnnnnnnnnnnnnnnnnnnnnnnnnnnnnnnnnnnnnnnnnnnnnnnnnnnnnnnnnnnnnnnnnnnnnnnnnnnnnnnnnnnnnnnnnnnnnnnnnnnnnnnnnnnnnnnnnnnnnnnnnnnnnnnnnnnnnnnnnnnnnnnnnnnnnnnnnnnnnnnnnnnnnnnnnnnnnnnnnnnnnnnnnnnnnnnnnnnnnnnnnnnnnnnnnnnnnnnnnnnnnnnnnnnnnnnnnnnnnnnnnnnnnnnnnnnnnnnnnnnnnnnnnnnnnnnnnnnnnnnnnnnnnnnnnnnnnnnnnnnnnnnnnnnnnnnnnnnnnnnnnnnnnnnnnnnnnnnnnnnnnnnnnnnnnnnnnnnnnnnnnnnnnnnnnnnnnnnnnnnnnnnnnnnnnnnnnnnnnnnnnnnnnnnnnnnnnnnnnnnnnnnnnnnnnnnnnnnnnnnnnnnnnnnnnnnnnnnnnnnnnnnnnnnnnnnnnnnnnnnnnnnnnnnnnnnnnnnnnnnnnnnnnnnnnnnnnnnnnnnnnnnnnnnnnnnnnnnnnnnnnnnnnnnnnnnnnnnnnnnnnnnnnnnnnnnnnnnnnnnnnnnnnnnnnnnnnnnnnnnnnnnnnnnnnnnnnnnnnnnnnnnnnnnnnnnnnnnnnnnnnnnnnnnnnnnnnnnnnnnnnnnnnnnnnnnnnnnnnnnnnnnnnnnnnnnnnnnnnnnnnnnnnnnnnnnnnnnnnnnnnnnnnnnnnnnnnnnnnnnnnnnnnnnnnnnnnnnnnnnnnnnnnnnnnnnnnnnnnnnnnnnnnnnnnnnnnnnnnnnnnnnnnnnnnnnnnnnnnnnnnnnnnnnnnnnnnnnnnnnnnnnnnnnnnnnnnnnnnnnnnnnnnnnnnnnnnnnnnnnnnnnnnnnnnnnnnnnnnnnnnnnnnnnnnnnnnnnnnnnnnnnnnnnnnnnnnnnnnnnnnnnnnnnnnnnnnnnnnnnnnnnnnnnnnnntggtggtgaaactcttacttaaaactggacacgttgatttgcagccaaaggacgacccctttggttggacaccgctgtatgtcgctgcatggcatggctacgaagcggtggtgaagcttttacttgcgaccgagggtgttgacgcagattcaaaggactccaacggctggacaccgttgttgcgggctgcgcaggcgggccacgaggcggtggtggaatgtttacttgagactgaacaagttgttgtgcagccagaggaaggccccggcgattggacaccgctgtccgtcgccacgcagaatggccatgaagcggtggtggagcttttacggtggagcgagtggcgaagcttttggaatcgagcaggtcgataaatcaggaattcgtaaacaatataaacgggcttgaaactcgcattcccataaagattcatgctttaaaggggctagcttggcgccatcttggcgtgatcactggtgattgaatgtgaaaaccaacctctaccaaggaacgaaggcttccgaagtggtgccaattaggtcgacttacagattaatacagcggctaaatatccagattactctatgtaagaaacaatacacggcccactaacaaggatactccggaataactcccaatatagactagtctgtcttggcagttagggtttgagaaacaatcgaagagtgcaagtggtgacaccagtttcgggaagtactgtatcgcagcggtaccctatacactgtaccctatacagtttcgagaagtactgtattccaaggacatactcgagagatagagagaccggaccatggggatgaccacgagaagccagccatctcccacccccgaagccgcaaaccccacaatctcacccgaataccccaacgttgaggacttttctctcgccgaggatgattctcatgatgaggacgattctcacgtcgaggatgattctcacgatgaggattactttctcgtctcaatcacctacgactactccaccatcacagcccgagctcgttcgttccaaggaatagtgcttgctggggccactccgctccaactggcccagaatggcttctattaccgaccttcaggagtcagcaatgtggcatgctgttttgcctgccaatcgaccaagcacttatccaccctccaatgcaccccgttcgaggaagtgcaacagctacacgaggaagactgcatatggcagataatctcgtgcgatttgaaacaccacctcggaacccccaacaaaccgccctcctcaaccaccgcattcccctcccctaaaccgtcaactcctaccgccgattccagtacacaaactacagacgactccagtataaagtctcaaactcaatccacgccgatcacatttacttcagcgaaggaacggttgaacactaacctggactgccgttccaatccgctacccaccataattgacccagagcctcaacaacctccaacagcccactctccccagcttcatcaaacgataccgtccatcacttcctcgccccaaaaccaacaaacaacgtatgcttccgtcctccagcgacctgtcacatccataccgcgaccgactcctccagtgcaagaaccttttcttcccgccaaccccacactcacaattgaagatcttcatctccgttttcacaataaaccgtcaccgttccaggtcgagaataagacaagccaacgctcaaccaaacgaactcggaacaaaaccgtatctgtcacacaatcactgtccagattcttagcctctgctttgcccgcattctcgcggttcttaacagagatgcagccaaaatcggacgcttgctgtccgtctcattcgtatatttctcacagccgcgccatgagagcagcctaataccgcaaacggcagcaaggccacgacaggccttaccaggtgaggctcaaagttcaccgttcaggcagtttggatcaatcccagggatcaaccaagatgtatttagaaagttgctgtagcctgtatatcgttcgcgagaggtcagggtaaatgaattctactactgtatcgcagcgagtttctcgtgggttagtacgtgggttagtaggctggcttgaaggtgcttctccaagtgttcaacatcctatcttcggcagttgaagcgcgtctaccatgtgtagcacgaggtggtgggtaagtagggtcggaagaaggggtaggggttatgttggtcgatatgttcaagtggcctcgagtcggcccgtcgcaatggcgaaacgtatggaggcctgtactgcctctaggtttagcgtccgcttctgatcatcagaaggctgttttccgcccaggaagaaagatatgtttcctcggtgagtctgcgtgcattgtaacatttccgtccggtacgtcatccacttccgacatcggaaaaggaagtgnnnnnnnnnnnnnnnnnnnnnnnnnnnnnnnnnnnnnnnnnnnnnnnnnnnnnnnnnnnnnnnnnnnnnnnnnnnnnnnnnnnnnnnnnnnnnnnnnnnnnnnnnnnnnnnnnnnnnnnnnnnnnnnnnnnnnnnnnnnnnnnnnnnnnnnnnnnnnnnnnnnnnnnnnnnnnnnnnnnnnnnnnnnnnnnnnnnnnnnnnnnnnnnnnnnnnnnnnnnnnnnnnnnnnnnnnnnnnnnnnnnnnnnnnnnnnnnnnnnnnnnnnnnnnnnnnnnnnnnnnnnnnnnnnnnnnnnnnnnnnnnnnnnnnnnnnnnnnnnnnnnnnnnnnnnnnnnnnnnnnnnnnnnnnnnnnnnnnnnnnnnnnnnnnnnnnnnnnnnnnnnnnnnnnnnnnnnnnnnnnnnnnnnnnnnnnnnnnnnnnnnnnnnnnnnnnnnnnnnnnnnnnnnnnnnnnnnnnnnnnnnnnnnnnnnnnnnnnnnnnnnnnnnnnnnnnnnnnnnnnnnnnnnnnnnnnnnnnnnnnnnnnnnnnnnnnnnnnnnnnnnnnnnnnnnnnnnnnnnnnnnnnnnnnnnnnnnnnnnnnnnnnnnnnnnnnnnnnnnnnnnnnnnnnnnnnnnnnnnnnnnnnnnnnnnnnnnnnnnnnnnnnnnnnnnnnnnnnnnnnnnnnnnnnnnnnnnnnnnnnnnnnnnnnnnnnnnnnnnnnnnnnnnnnnnnnnnnnnnnnnnnnnnnnnnnnnnnnnnnnnnnnnnnnnnnnnnnnnnnnnnnnnnnnnnnnnnnnnnnnnnnnnnnnnnnnnnnnnnnnnnnnnnnnnnnnnnnnnnnnnnnnnnnnnnnnnnnnnnnnnnnnnnnnnnnnnnnnnnnnnnnnnnnnnnnnnnnnnnnnnnnnnnnnnnnnnnnnnnnnnnnnnnnnnnnnnnnnnnnnnnnnnnnnnnnnnnnnnnnnnnnnnnnnnnnnnnnnnnnnnnnnnnnnnnnnnnnnnnnnnnnnnnnnnnnnnnnnnnnnnnnnnnnnnnnnnnnnnnnnnnnnnnnnnnnnnnnnnnnnnnnnnnnnnnnnnnnnnnnnnnnnnnnnnnnnnnnnnnnnnnnnnnnnnnnnnnnnnnnnnnnnnnnnnnnnnnnnnnnnnnnnnnnnnnnnnnnnnnnnnnnnnnnnnnnnnnnnnnnnnnnnnnnnnnnnnnnnnnnnnnnnnnnnnnnnnnnnnnnnnnnnnnnnnnnnnnnnnnnnnnnnnnnnnnnnnnnnnnnnnnnnnnnnnnnnnnnnnnnnnnnnnnnnnnnnnnnnnnnnnnnnnnnnnnnnnnnnnnnnnnnnnnnnnnnnnnnnnnnnnnnnnnnnnnnnnnnnnnnnnnnnnnnnnnnnnnnnnnnnnnnnnnnnnnnnnnnnnnnnnnnnnnnnnnnnnnnnnnnnnnnnnnnnnnnnnnnnnnnnnnnnnnnnnnnnnnnnnnnnnnnnnnnnnnnnnnnnnnnnnnnnnnnnnnnnnnnnnnnnnnnnnnnnnnnnnnnnnnnnnnnnnnnnnnnnnnnnnnnnnnnnnnnnnnnnnnnnnnnnnnnnnnnnnnnnnnnnnnnnnnnnnnnnnnnnnnnnnnnnnnnnnnnnnnnnnnnnnnnnnnnnnnnnnnnnnnnnnnnnnnnnnnnnnnnnnnnnnnnnnnnnnnnnnnnnnnnnnnnnnnnnnnnnnnnnnnnnnnnnnnnnnnnnnnnnnnnnnnnnnnnnnnnnnnnnnnnnnnnnnnnnnnnnnnnnnnnnnnnnnnnnnnnnnnnnnnnnnnnnnnnnnnnnnnnnnnnnnnnnnnnnnnnnnnnnnnnnnnnnnnnnnnnnnnnnnnnnnnnnnnnnnnnnnnnnnnnnnnnnnnnnnnnnnnnnnnnnnnnnnnnnnnnnnnnnnnnnnnnnnnnnnnnnnnnnnnnnnnnnnnnnnnnnnnnnnnnnnnnnnnnnnnnnnnnnnnnnnnnnnnnnnnnnnnnnnnnnnnnnnnnnnnnnnnnnnnnnnnnnnnnnnnnnnnnnnnnnnnnnnnnnnnnnnnnnnnnnnnnnnnnnnnnnnnnnnnnnnnnnnnnnnnnnnnnnnnnnnnnnnnnnnnnnnnnnnnnnnnnnnnnnnnnnnnnnnnnnnnnnnnnnnnnnnnnnnnnnnnnnnnnnnnnnnnnnnnnnnnnnnnnnnnnnnnnnnnnnnnnnnnnnnnnnnnnnnnnnnnnnnnnnnnnnnnnnnnnnnnnnnnnnnnnnnnnnnnnnnnnnnnnnnnnnnnnnnnnnnnnnnnnnnnnnnnnnnnnnnnnnnnnnnnnnnnnnnnnnnnnnnnnnnnnnnnnnnnnnnnnnnnnnnnnnnnnnnnnnnnnnnnnnnnnnnnnnnnnnnnnnnnnnnnnnnnnnnnnnnnnnnnnnnnnnnnnnnnnnnnnnnnnnnnnnnnnnnnnnnnnnnnnnnnnnnnnnnnnnnnnnnnnnnnnnnnnnnnnnnnnnnnnnnnnnnnnnnnnnnnnnnnnnnnnnnnnnnnnnnnnnnnnnnnnnnnnnnnnnnnnnnnnnnnnnnnnnnnnnnnnnnnnnnnnnnnnnnnnnnnnnnnnnnnnnnnnnnnnnnnnnnnnnnnnnnnnnnnnnnnnnnnnnnnnnnnnnnnnnnnnnnnnnnnnnnnnnnnnnnnnnnnnnnnnnnnnnnnnnnnnnnnnnnnnnnnnnnnnnnnnnnnnnnnnnnnnnnnnnnnnnnnnnnnnnnnnnnnnnnnnnnnnnnnnnnnnnnnnnnnnnnnnnnnnnnnnnnnnnnnnnnnnnnnnnnnnnnnnnnnnnnnnnnnnnnnnnnnnnnnnnnnnnnnnnnnnnnnnnnnnnnnnnnnnnnnnnnnnnnnnnnnnnnnnnnnnnnnnnnnnnnnnnnnnnnnnnnnnnnnnnnnnnnnnnnnnnnnnnnnnnnnnnnnnnnnnnnnnnnnnnnnnnnnnnnnnnnnnnnnnnnnnnnnnnnnnnnnnnnnnnnnnnnnnnnnnnnnnnnnnnnnnnnnnnnnnnnnnnnnnnnnnnnnnnnnnnnnnnnnnnnnnnnnnnnnnnnnnnnnnnnnnnnnnnnnnnnnnnnnnnnnnnnnnnnnnnnnnnnnnnnnnnnnnnnnnnnnnnnnnnnnnnnnnnnnnnnnnnnnnnnnnnnnnnnnnnnnnnnnnnnnnnnnnnnnnnnnnnnnnnnnnnnnnnnnnnnnnnnnnnnnnnnnnnnnnnnnnnnnnnnnnnnnnnnnnnnnnnnnnnnnnnnnnnnnnnnnnnnnnnnnnnnnnnnnnnnnnnnnnnnnnnnnnnnnnnnnnnnnnnnnnnnnnnnnnnnnnnnnnnnnnnnnnnnnnnnnnnnnnnnnnnnnnnnnnnnnnnnnnnnnnnnnnnnnnnnnnnnnnnnnnnnnnnnnnnnnnnnnnnnnnnnnnnnnnnnnnnnnnnnnnnnnnnnnnnnnnnnnnnnnnnnnnnnnnnnnnnnnnnnnnnnnnnnnnnnnnnnnnnnnnnnnnnnnnnnnnnnnnnnnnnnnnnnnnnnnnnnnnnnnnnnnnnnnnnnnnnnnnnnnnnnnnnnnnnnatttcaattacgagggttatcccgcgaagcgcaactctctaccatgagctcatccacctcgtcgttggtactgacaaaacacaagattacacttgtaagttcttgtcggatatgttaggtcagaccaacgctgataacctgaagacgaatggagtaagatgcaaactgcgctcaagaagcccaatggtacgccgtcgaagaaagaagaggaaaaaactgggcaatattgggatggaatgaaatatcaggatatcatgcgtcaaaatcctgagacatttgtcttcttcagcgtggggtattggtattttctgcagactacatggaacaagaatgcgcggaagcggtggagcttcgatactggtgcagctcggctcgtggcgatataggcaaatgacgaaaatggaaatggacattttctagaagcgaaatcgacaaatttggtacacaatcactgttcaaagtttgacagggccttgaaagctgcctttttgcttctttcttatatacagttgcatagaaagcactttgggatttgggacttcacacttgtcctcgcttgttttcacttgtttgtcgctggtttgtttcgtataattttgtacggcagaatacggagtaagatcgtgagagttgctctattaagggtatgaggaatttagtagtagtcgctaccaatagcaaagagtaaatttcaaatcaaaaacaaagacattcaagcaagagtgattggcttgaaatcacaaaactcttccttccattccaaggctccgacgctttctagcttatcaacaaacttctctagtagggttctcgcgtcccacataagatagccactgttggaatatttcccaacatgcctatactcggcgctctttgcgtccgtccagaagtgcggccatagcatcaactgagcttcttggccatgcacgagctctgttccaatggcccatatctttaatggaaggtcggtttgacgacgcttcacaccatgccgcacaccgccaatccctgcagccggttcacgaataccaatcaaatccgaaatctgagtcttctgggcatcggtcactggtgtcaaaaagtatatccagaacaattccacgtaagagcacgttaacgcatcaaaccagctagggcccacatagtcggagctcctctgcgaaaatgtctctcgagaggacgtagctctgattcctctagcttcgaggttctcccgatagagctgggcggaaggcgaggccatgaatgccctcatatccgaggctctctcccatgcttggtggcagttagcgggacgacctttgattcccggttgatacacaactcacctgtaactaaaagaattgtatccgggcgctcctgcactcttgcatacccggaaccctcgtgccctggggcccgaagcagtggctggaaatgtccagcccattcggtatccagctccagtcccttggaaacttgaaactcggtccagattaggattgcttggtcgttgaggtcgtcaacctgtgatcgatctatagtatcatctcccaagggcgccatgactggagagggttgattcggatctgaacaggatttttggagagaacgactgggggcactggggttttactaagggcactagcgctagcgttgtttcgcctttggccactattcaacgcggtccctttcgtttcaatactggtaatgctatggtaaataaaccacgtgacatttctccttggcgttgtgagaaatcatattagtcaccatacttcgaatattgaagctatttgttagagtggtcacgtgattagcatgtgatcagccacgtgatcccaccgagtcctagccaatgagactataccgccgccaagtgcggttgagaaatctgggtttttacaaggatgcggctagtgatgggcgcattgctacagacgttgtgaatcaaagcacttcattactcccaccgttcatgcacgcgagactaaggccgtgcgttgatcaccagagccggataatcccgcaatcctctcagagttgactccgctttgaaatcgtaaatcaaacccgcctgagacaggaggtcagtaatatcccgaatacacaatttattagcgcccggcagctaagccgaaagggcaactatctttgatctactatacatgtcataatatatatagtacgatgtctcctccgagcccatacatgaagccttgcaatatatgtcatctcagatgtccgtatcgcagcggatcctcgtgggttagtaattgtgttagtaggctggcttgaaggcgcttctccaagtattcaacatcctattttcggcagttgaagcgcgtctaccgtctgtaacacgaggtggttggtgggttagatcggcgaaaggggggtgatttatgttcgtcggcgtggttaggtggcctcgagtcggcccgtggcgatggcgaatcgtattgaggcccgtaccgcgtctaagttcggcgtccacttctgatcatcggaaggcgactttcctcctaggaagaaggatatgtttcctcggtaggtgttggtacattgtaatagttccatccggtgcgccgtccatttttgacatcgaaataggaagtgnac

SEQ ID NO: 106 - DNA, 2508889 bp, Penicillium roqueforti (residues 1-1,254,445 of 2,508,889)
  misc_feature (1216)..(6722): n is a, c, g, or t
  misc_feature (98486)..(98857): n is a, c, g, or t
  misc_feature (139994)..(140089): n is a, c, g, or t
  misc_feature (294325)..(294500): n is a, c, g, or t
  misc_feature (357354)..(357539): n is a, c, g, or t
  misc_feature (460933)..(461009): n is a, c, g, or t
  misc_feature (472525)..(472706): n is a, c, g, or t
  misc_feature (615690)..(615971): n is a, c, g, or t
  misc_feature (740360)..(740468): n is a, c, g, or t
  misc_feature (916261)..(916397): n is a, c, g, or t
  misc_feature (1075413)..(1075558): n is a, c, g, or t
  misc_feature (1089885)..(1208385): n is a, c, g, or t
  misc_feature (1219975)..(1220016): n is a, c, g, or t
  misc_feature (1222376)..(1222549): n is a, c, g, or t
  misc_feature (1322066)..(1322136): n is a, c, g, or t
  misc_feature (1378218)..(1378590): n is a, c, g, or t
  misc_feature (1383261)..(1383620): n is a, c, g, or t
  misc_feature (1417302)..(1417562): n is a, c, g, or t
  misc_feature (1457284)..(1457478): n is a, c, g, or t
  misc_feature (1553470)..(1553540): n is a, c, g, or t
  misc_feature (1556372)..(1556476): n is a, c, g, or t
  misc_feature (1568073)..(1568168): n is a, c, g, or t
  misc_feature (1711202)..(1716944): n is a, c, g, or t
  misc_feature (1761859)..(1762000): n is a, c, g, or t
  misc_feature (1945736)..(1945833): n is a, c, g, or t
  misc_feature (1956336)..(1956458): n is a, c, g, or t
  misc_feature (2133054)..(2133157): n is a, c, g, or t
  misc_feature (2256405)..(2256563): n is a, c, g, or t
  misc_feature (2267731)..(2267762): n is a, c, g, or t
  misc_feature (2288074)..(2288242): n is a, c, g, or t
  misc_feature (2341475)..(2341493): n is a, c, g, or t
  misc_feature (2431100)..(2431445): n is a, c, g, or t
  misc_feature (2438809)..(2439259): n is a, c, g, or t
  misc_feature (2445091)..(2445235): n is a, c, g, or t
  misc_feature (2482527)..(2482735): n is a, c, g, or t
  misc_feature (2508883)..(2508884): n is a, c, g, or t
  misc_feature (2508886)..(2508887): n is a, c, g, or t
ttaaggtaagaaaaataagtcctacttagttaagtagtatggctataacgatattaaagtaacctaggaaccgcaatctataattaaggatactaaggcccttaataactataaggctaagttaactatagtaacgaaaataccgaagaagaataggactaagaatatatacccgaaatataagaagctttaattatagattaaaatttagtactacgtttcctatacttatatataggtataggtagggttattatatctaaccagactcaaatactaacagagcagtattaaaaatataataaagcagcgaaacagactctatacttagggtatcctaggaagtaggggctaagtttatagggataaataaagcgttactaggtatacctatattagaaactacgctttcttccgtaatactagtaggagtatcgaagaattcctcagctttagagatttcccctatattctctataactcctagggccctaataactttagcgaccactgtaacctctgcggcttttataatagtagtagcctttttagccttattagctatataggttaagcgcttaacattctactcgataatatatacttagggtatacgagtatatataggtgatatattaagagcggtataggtagtagactaaaccttagaaggaagctatactattattaataacgaattccttcctataataatatagttaaaaaacttataaggatataactgtactttacagaagagtagtaaatatatttagtataacctataagggtcttatacttatggtctaggtagctttataactggaaaaagtaccgctagtaaggtaatagcctctcgataggcttaggggtttctaagtatagaggtagagttataggcctatagcctactaaaagataacgttatacctatagatatagagatttatcctccttagaggaggatagtataggacagcaatatactattactattttataaatatagttagtatataaatataaaaataaggccgttttctataaggaagggacagatataatattaaaatttcttagtatactatatagaatgtaatactactaaatctaaagatatatctactatatttactagctaatagtaataccctaactagaataatattatcttaatagaagtataatagaaatttaatagaaatataaattaggnnnnnnnnnnnnnnnnnnnnnnnnnnnnnnnnnnnnnnnnnnnnnnnnnnnnnnnnnnnnnnnnnnnnnnnnnnnnnnnnnnnnnnnnnnnnnnnnnnnnnnnnnnnnnnnnnnnnnnnnnnnnnnnnnnnnnnnnnnnnnnnnnnnnnnnnnnnnnnnnnnnnnnnnnnnnnnnnnnnnnnnnnnnnnnnnnnnnnnnnnnnnnnnnnnnnnnnnnnnnnnnnnnnnnnnnnnnnnnnnnnnnnnnnnnnnnnnnnnnnnnnnnnnnnnnnnnnnnnnnnnnnnnnnnnnnnnnnnnnnnnnnnnnnnnnnnnnnnnnnnnnnnnnnnnnnnnnnnnnnnnnnnnnnnnnnnnnnnnnnnnnnnnnnnnnnnnnnnnnnnnnnnnnnnnnnnnnnnnnnnnnnnnnnnnnnnnnnnnnnnnnnnnnnnnnnnnnnnnnnnnnnnnnnnnnnnnnnnnnnnnnnnnnnnnnnnnnnnnnnnnnnnnnnnnnnnnnnnnnnnnnnnnnnnnnnnnnnnnnnnnnnnnnnnnnnnnnnnnnnnnnnnnnnnnnnnnnnnnnnnnnnnnnnnnnnnnnnnnnnnnnnnnnnnnnnnnnnnnnnnnnnnnnnnnnnnnnnnnnnnnnnnnnnnnnnnnnnnnnnnnnnnnnnnnnnnnnnnnnnnnnnnnnnnnnnnnnnnnnnnnnnnnnnnnnnnnnnnnnnnnnnnnnnnnnnnnnnnnnnnnnnnnnnnnnnnnnnnnnnnnnnnnnnnnnnnnnnnnnnnnnnnnnnnnnnnnnnnnnnnnnnnnnnnnnnnnnnnnnnnnnnnnnnnnnnnnnnnnnnnnnnnnnnnnnnnnnnnnnnnnnnnnnnnnnnnnnnnnnnnnnnnnnnnnnnnnnnnnnnnnnnnnnnnnnnnnnnnnnnnnnnnnnnnnnnnnnnnnnnnnnnnnnnnnnnnnnnnnnnnnnnnnnnnnnnnnnnnnnnnnnnnnnnnnnnnnnnnnnnnnnnnnnnnnnnnnnnnnnnnnnnnnnnnnnnnnnnnnnnnnnnnnnnnnnnnnnnnnnnnnnnnnnnnnnnnnnnnnnnnnnnnnnnnnnnnnnnnnnnnnnnnnnnnnnnnnnnnnnnnnnnnnnnnnnnnnnnnnnnnnnnnnnnnnnnnnnnnnnnnnnnnnnnnnnnnnnnnnnnnnnnnnnnnnnnnnnnnnnnnnnnnnnnnnnnnnnnnnnnnnnnnnnnnnnnnnnnnnnnnnnnnnnnnnnnnnnnnnnnnnnnnnnnnnnnnnnnnnnnnnnnnnnnnnnnnnnnnnnnnnnnnnnnnnnnnnnnnnnnnnnnnnnnnnnnnnnnnnnnnnnnnnnnnnnnnnnnnnnnnnnnnnnnnnnnnnnnnnnnnnnnnnnnnnnnnnnnnnnnnnnnnnnnnnnnnnnnnnnnnnnnnnnnnnnnnnnnnnnnnnnnnnnnnnnnnnnnnnnnnnnnnnnnnnnnnnnnnnnnnnnnnnnnnnnnnnnnnnnnnnnnnnnnnnnnnnnnnnnnnnnnnnnnnnnnnnnnnnnnnnnnnnnnnnnnnnnnnnnnnnnnnnnnnnnnnnnnnnnnnnnnnnnnnnnnnnnnnnnnnnnnnnnnnnnnnnnnnnnnnnnnnnnnnnnnnnnnnnnnnnnnnnnnnnnnnnnnnnnnnnnnnnnnnnnnnnnnnnnnnnnnnnnnnnnnnnnnnnnnnnnnnnnnnnnnnnnnnnnnnnnnnnnnnnnnnnnnnnnnnnnnnnnnnnnnnnnnnnnnnnnnnnnnnnnnnnnnnnnnnnnnnnnnnnnnnnnnnnnnnnnnnnnnnnnnnnnnnnnnnnnnnnnnnnnnnnnnnnnnnnnnnnnnnnnnnnnnnnnnnnnnnnnnnnnnnnnnnnnnnnnnnnnnnnnnnnnnnnnnnnnnnnnnnnnnnnnnnnnnnnnnnnnnnnnnnnnnnnnnnnnnnnnnnnnnnnnnnnnnnnnnnnnnnnnnnnnnnnnnnnnnnnnnnnnnnnnnnnnnnnnnnnnnnnnnnnnnnnnnnnnnnnnnnnnnnnnnnnnnnnnnnnnnnnnnnnnnnnnnnnnnnnnnnnnnnnnnnnnnnnnnnnnnnnnnnnnnnnnnnnnnnnnnnnnnnnnnnnnnnnnnnnnnnnnnnnnnnnnnnnnnnnnnnnnnnnnnnnnnnnnnnnnnnnnnnnnnnnnnnnnnnnnnnnnnnnnnnnnnnnnnnnnnnnnnnnnnnnnnnnnnnnnnnnnnnnnnnnnnnnnnnnnnnnnnnnnnnnnnnnnnnnnnnnnnnnnnnnnnnnnnnnnnnnnnnnnnnnnnnnnnnnnnnnnnnnnnnnnnnnnnnnnnnnnnnnnnnnnnnnnnnnnnnnnnnnnnnnnnnnnnnnnnnnnnnnnnnnnnnnnnnnnnnnnnnnnnnnnnnnnnnnnnnnnnnnnnnnnnnnnnnnnnnnnnnnnnnnnnnnnnnnnnnnnnnnnnnnnnnnnnnnnnnnnnnnnnnnnnnnnnnnnnnnnnnnnnnnnnnnnnnnnnnnnnnnnnnnnnnnnnnnnnnnnnnnnnnnnnnnnnnnnnnnnnnnnnnnnnnnnnnnnnnnnnnnnnnnnnnnnnnnnnnnnnnnnnnnnnnnnnnnnnnnnnnnnnnnnnnnnnnnnnnnnnnnnnnnnnnnnnnnnnnnnnnnnnnnnnnnnnnnnnnnnnnnnnnnnnnnnnnnnnnnnnnnnnnnnnnnnnnnnnnnnnnnnnnnnnnnnnnnnnnnnnnnnnnnnnnnnnnnnnnnnnnnnnnnnnnnnnnnnnnnnnnnnnnnnnnnnnnnnnnnnnnnnnnnnnnnnnnnnnnnnnnnnnnnnnnnnnnnnnnnnnnnnnnnnnnnnnnnnnnnnnnnnnnnnnnnnnnnnnnnnnnnnnnnnnnnnnnnnnnnnnnnnnnnnnnnnnnnnnnnnnnnnnnnnnnnnnnnnnnnnnnnnnnnnnnnnnnnnnnnnnnnnnnnnnnnnnnnnnnnnnnnnnnnnnnnnnnnnnnnnnnnnnnnnnnnnnnnnnnnnnnnnnnnnnnnnnnnnnnnnnnnnnnnnnnnnnnnnnnnnnnnnnnnnnnnnnnnnnnnnnnnnnnnnnnnnnnnnnnnnnnnnnnnnnnnnnnnnnnnnnnnnnnnnnnnnnnnnnnnnnnnnnnnnnnnnnnnnnnnnnnnnnnnnnnnnnnnnnnnnnnnnnnnnnnnnnnnnnnnnnnnnnnnnnnnnnnnnnnnnnnnnnnnnnnnnnnnnnnnnnnnnnnnnnnnnnnnnnnnnnnnnnnnnnnnnnnnnnnnnnnnnnnnnnnnnnnnnnnnnnnnnnnnnnnnnnnnnnnnnnnnnnnnnnnnnnnnnnnnnnnnnnnnnnnnnnnnnnnnnnnnnnnnnnnnnnnnnnnnnnnnnnnnnnnnnnnnnnnnnnnnnnnnnnnnnnnnnnnnnnnnnnnnnnnnnnnnnnnnnnnnnnnnnnnnnnnnnnnnnnnnnnnnnnnnnnnnnnnnnnnnnnnnnnnnnnnnnnnnnnnnnnnnnnnnnnnnnnnnnnnnnnnnnnnnnnnnnnnnnnnnnnnnnnnnnnnnnnnnnnnnnnnnnnnnnnnnnnnnnnnnnnnnnnnnnnnnnnnnnnnnnnnnnnnnnnnnnnnnnnnnnnnnnnnnnnnnnnnnnnnnnnnnnnnnnnnnnnnnnnnnnnnnnnnnnnnnnnnnnnnnnnnnnnnnnnnnnnnnnnnnnnnnnnnnnnnnnnnnnnnnnnnnnnnnnnnnnnnnnnnnnnnnnnnnnnnnnnnnnnnnnnnnnnnnnnnnnnnnnnnnnnnnnnnnnnnnnnnnnnnnnnnnnnnnnnnnnnnnnnnnnnnnnnnnnnnnnnnnnnnnnnnnnnnnnnnnnnnnnnnnnnnnnnnnnnnnnnnnnnnnnnnnnnnnnnnnnnnnnnnnnnnnnnnnnnnnnnnnnnnnnnnnnnnnnnnnnnnnnnnnnnnnnnnnnnnnnnnnnnnnnnnnnnnnnnnnnnnnnnnnnnnnnnnnnnnnnnnnnnnnnnnnnnnnnnnnnnnnnnnnnnnnnnnnnnnnnnnnnnnnnnnnnnnnnnnnnnnnnnnnnnnnnnnnnnnnnnnnnnnnnnnnnnnnnnnnnnnnnnnnnnnnnnnnnnnnnnnnnnnnnnnnnnnnnnnnnnnnnnnnnnnnnnnnnnnnnnnnnnnnnnnnnnnnnnnnnnnnnnnnnnnnnnnnnnnnnnnnnnnnnnnnnnnnnnnnnnnnnnnnnnnnnnnnnnnnnnnnnnnnnnnnnnnnnnnnnnnnnnnnnnnnnnnnnnnnnnnnnnnnnnnnnnnnnnnnnnnnnnnnnnnnnnnnnnnnnnnnnnnnnnnnnnnnnnnnnnnnnnnnnnnnnnnnnnnnnnnnnnnnnnnnnnnnnnnnnnnnnnnnnnnnnnnnnnnnnnnnnnnnnnnnnnnnnnnnnnnnnnnnnnnnnnnnnnnnnnnnnnnnnnnnnnnnnnnnnnnnnnnnnnnnnnnnnnnnnnnnnnnnnnnnnnnnnnnnnnnnnnnnnnnnnnnnnnnnnnnnnnnnnnnnnnnnnnnnnnnnnnnnnnnnnnnnnnnnnnnnnnnnnnnnnnnnnnnnnnnnnnnnnnnnnnnnnnnnnnnnnnnnnnnnnnnnnnnnnnnnnnnnnnnnnnnnnnnnnnnnnnnnnnnnnnnnnnnnnnnnnnnnnnnnnnnnnnnnnnnnnnnnnnnnnnnnnnnnnnnnnnnnnnnnnnnnnnnnnnnnnnnnnnnnnnnnnnnnnnnnnnnnnnnnnnnnnnnnnnnnnnnnnnnnnnnnnnnnnnnnnnnnnnnnnnnnnnnnnnnnnnnnnnnnnnnnnnnnnnnnnnnnnnnnnnnnnnnnnnnnnnnnnnnnnnnnnnnnnnnnnnnnnnnnnnnnnnnnnnnnnnnnnnnnnnnnnnnnnnnnnnnnnnnnnnnnnnnnnnnnnnnnnnnnnnnnnnnnnnnnnnnnnnnnnnnnnnnnnnnnnnnnnnnnnnnnnnnnnnnnnnnnnnnnnnnnnnnnnnnnnnnnnnnnnnnnnnnnnnnnnnnnnnnnnnnnnnnnnnnnnnnnnnnnnnnnnnnnnnnnnnnnnnnnnnnnnnnnnnnnnnnnnnnnnnnnnnnnnnnnnnnnnnnnnnnnnnnnnnnnnnnnnnnnnnnnnnnnnnnnnnnnnnnnnnnnnnnnnnnnnnnnnnnnnnnnnnnnnnnnnnnnnnnnnnnnnnnnnnnnnnnnnnnnnnnnnnnnnnnnnnnnnnnnnnnnnnnnnnnnnnnnnnnnnnnnnnnnnnnnnnnnnnnnnnnnnnnnnnnnnnnnnnnnnnnnnnnnnnnnnnnnnnnnnnnnnnnnnnnnnnnnnnnnnnnnnnnnnnnnnnnnnnnnnnnnnnnnnnnnnnnnnnnnnnnnnnnnnnnnnnnnnnnnnnnnnnnnnnnnnnnnnnnnnnnnnnnnnnnnnnnnnnnnnnnnnnnnnnnnnnnnnnnnnnnnnnnnnnnnnnnnnnnnnnnnnnnnnnnnnnnnnnnnnnnnnnnnnnnnnnnnnnnnnnnnnnnnnnnnnnnnnnnnnnnnnnnnngattatgggtttcccggcccattggtgggctgggctgggctgggctatgggctgggtgggctttgccgatgtctacctataagtaactttaagaatactcccgaaaagatcaagcagttctatgatcagtacccgtagaagcctagaccaccgatacgattataagaatagaccgatactgcagataaggatagattcttagataaccacgttaacgataataaacctgcatttaggggctaaatgcattcttagccgggggttatataatgatctaagaggatcgtacttgcctaacggggcaggagcggtcacgtcctcgtacttgccgtaggaacgactataccctcgcaccttcctaaaagaacgaacgagaattaagtgagacaaacgcaagagtataagaaggaaagaacacgcacttagatagtttctctttttcctttcttcctcgtacttagaatttggttggaattgcactcttttcctttgaattgaattggctcgtaacaggtatggcgagagcgaggtccttatcgttgaggtaaagggcggcgctaaggggagcaatcctattccctaactcctcggatatatgggttatatctcgctatatgtattaaactatatttaagcaagctaatcggtatgaaagggtgcatccaccgtggacgtaaggacgagcagaagcgcaactgcagtgtctacggtatggcgtatactggatccgttcggcattttttgaaaataagtcacgagtcaaaggtaagctggttaataccagcaaagaacacaactctaatatttattagcggtcggaatttgctactgtcggttgtcgaggcgctctcgagcagccgttcggtttgctagtatggatgctgcggagggcagctgccatctccccagcccactcaaaggaaaactcagcggaaactcatagtttggtggggtctgaggagatggtgtttgaatgagcggtgctgaggggaaggaggagtgttgtactgattcatggcgcagtgtggtgttggctgatacctcttcccccttctcacttgagtcagctcttatcgcgaggtcaccattactagttggttaatctcttaatacaataacctcaaaaaggaagtgctcgcctcttactcccatgagttcgtgataagagtgctctaaatatttacatattgtattcctattcgaggaacatggccatcggtgcaccttcgtacaacatatactcatagctgcggaatcttggaacctcggaccagcgtgctgcgtacgtaatacgaggtttttaggttttcagggacaggcctggaattatagtaccgccttcctgatctagtactattcaggattctgccatatttctaccgcactttattttttccgccatgtacatatattctatggagacatgcattttgattagacaaaatcttatattctgcctaattcctgtagtattcaactctggatccggatctagcatatgaggcaagaaaagaaaactggagatttcatagttgggggcagcggaggataccgtatacgagggcttatctatttgaaatggcccccattctacagttacaggggtcctcacaaagaggccgaaaagcacaagagacaacgaaaaacatccaactggataagttcctcaatgttcgtcctgtcgagaatacgaagcctcccttcttccaattggtggccgcaaaaagtacctgaagggccttacgataagccctacgaatacctttcaaagcgcctcacaggacgccagcggggctcgaaagggccgtcaaaatcccaaggccccaattagaatgaatatcttcgattatacgctggaggtttattcggtacgatttgatccccattgctacttttcatactgtgacggtgtactccgtacagaaatttgtgtgcagataaggaagctagataacccgtcggagcttacgggctagccaaacgttctaaccgctttagcctgacttatacgtaaggtagagcggcctcggcatgttcgggattcgagaccaatgtcactctccatagagagaggaaaagcttctttgtgtctgcgttgaacttactccatactgagtacctggatcgagtggcgctccaatcgtagatttaagaatgatgcagtctgcagccaatacaatggtgttacccctcaacgtgccatgcatgctatgcatagggagtggaggtaatccagggtcaattactcttgatcacagcagggttgaatttttacagttttagtcgcaatgggaaccttggaatcacggaatactcgagaccgctctatcctgactattgggcagcgttgccctcactaggatcggcgcgtttgagatcggcgcgttgagatcggcggcctcaacgtcgggaactcaatgctattgatgagaccaagctttatggtccagcagaagctgcagaattttcacgccacggatctcagaacggcctatcattgggggaaaattatatggccaaacctggaccgtagtggaaaacaatgtggatgaaacttacataggtgaacacatgggatcgatttccttgccaagtaacctaattacctgccaagagccttggcaagccctagttcgggaagtggattctccagcacttatctacctcgtactccgtacggagtacgaggtactccgaggtactccgtatgtacgatgtatgtaactctgaaatatctacgcagctgataggtgggctattaattaacaaaaaggtgtgctccatgttttgcattacatagtgtagatcattttcattctatatgataatggccaaattacataattgtagggcggattgttgccaatgctgccatgtggacctttccggacatagcttccaatactttgattgatcgcccgagtaattaccctaaatctatcaaaagcccgagcttctggaagcgtatggagtaggtgtgagcatttcccattttatagccatgtgatcggtggtgttggcaatggcctaaattgctgatcagaagcgatcctaaaatccgattatcgtgtcgccctgcctagatccacttcatatgtggtttaagagacattatcattgattgaaagttcttcatgtagcgaaattcggagatttcatgtgaaattgtatagagatatactcagaatatgcatataatcacgctagtttattcgaaacggcgatcctgaaggttggcttatcaagatcatgccggtatattactgcattcggcaaaaggaaattcgaataatatcaaacagaaagtttaataacaaaaagctcaattgaaacaggagtccgattttgacattcggcctccggaaactccaatgtctatcaagaccctagactttcgatcacatcacggccctgagatgatagacgacatgatgtctctatctttgaccaataccatcctctcagctgtgtgatgtacaagctgatctatccgaccatgaacggaattccgtgggtagaccatgagtatcgggatgccctgcggatctttctcttctcagcctcgaccgagcttgccgccgtactttgcatggatgatttcgggatcacaatgaggtctgtgatgtaacttgcaagatgtcggtggatcgggtggatatcgttagtggatacagtaagctgtgaaggactcctacttttgggtctatatcaggtttgtagtgggtgttactagggaatggggcagcatataagtcgtgaaggacttctcctttttgggttgtgtatcaagttgagttgagacattatctgcacaaaagatatatacaatggcagacttatcaagatcttcgtatgttttgtgacatttatcatgatcttttttccacccctttttggatgtcctattgaagtttcttccaattctgaccgtcatacagacttatagaacagcttttacacctccgcagtgaggcctctcatccagactcttgccgtcaactctccgctctattatccctacacaccggctcttggcccatccgtcacctaatcctaacatttcaggacatttacaagtccattcccgaatccatcaaggccaacaacaatgaatcaattacctacctccgtgcacaagtcaaagcagccacccccagcgttgcggaattaatagggacagactcccgcgccggtctcatcgatgctaacaccggacggcatctgacacatattgccatacggcagttcttggagagtttccagcttcccgtgggactctcccgtcatggaaagcctcgcatcgctgtcatcttgcctaacggccctctgatggcagtcgctgttcttgctttcgtcaacaggtacaccattgtgcctatgacaacgaacacggtgccagagcaattacagacagatatagaaaactcgcaagctgatgctgttgtcgcgctggacgctgacattggcaagctgcagctgaacaatggcagtcggccagtgtttggtattgagcaacttgaagacatgactttccgggtggtctctgcgcacaatgcttctggtgcatacaaccatccccccaattctggggacgatatcgccattatcttgttcactagtggtactagtggtactaagaagctggttcccatcacaacttacaacctcatcgcgggtaccatggctaccatagagtcagtcgaactgtccgagacagatatctgtcttaatatgatgcctctgaaccatgtgtatgttccctgccaaattaaattataggaagacagctaacattatcagtggtggcatcatgcgaagtatcttctcacccgtactcgccggcggtgccacaatatgttgcccctcgtttgaccccagcatgttctgggatgccgtgcaaactcctcatatgacaccaacttggtactatgctacacctacaatgcaccagatgattcttgctgaagctgagcaccgccccgatgctgtcaagcaaagtgccatccagtttatctgcaacgctggtggtggtctccctccaacacttgccgtgcagctccatgatattttccactgcgccgtcctccccagttacggtatgactgaatgtatgcctattgccgcgccaccgaggagctacaagcttgatcgccatggaacatcgggaaagatcgtcggtcctgaggttgcaattctgaccgagagtggcgagcctgtccagcaaaatgggatgctaggacacatctgcattcgtggatcacccgcttttgaagggtatctgacccctggaggcaagattgacaccagtgcattcaacgaatccggctggtttgatactggtgatcttggacacctcgacgatgacaactacctgtacatcactggccgcagcaaggaggtcatcaaccgtggtggtgaaattatctctcccgtcgaagtggaaaatgcaatcctgaccacagccaaggatcctgaatccccgctgtatggtcgtgttactgagacgttagccttttctgtcccagacgaggtactgcaagaagttgtcggtgtggttattgtcacacctccgggcttcactaggccggatcttcgccagatacacgaagcactgcagcctattctccaccagcctaagtggcccgctctggtagtatacatggacggcgtgcccaaggcaaacaacaaaatccagcggatcaagctcgcagagcggctgtccctggatatcttgaccacggccacacccctggcaagcaggcactacgaagctgtctgcccacctactggcgctccactcagcgcatcaatctcgaagaacttgtgtgtcatcgatgataaaataatccgctcagttctcaccaagagagcaaatacccctgacatgcacgtgcaaataaacccgcgcgatgggctcgcacaggttattttgtttgtccagaacccagatgatgaccatgtgacacctggcgagctccacgaccacctccatggctatctcgtacctagccgtatcattccactcaaaggtcccatgcctctcgacttctacggaaaccccgactcggccgcgatcaatgaggccatccttgcccgcaactcggatggtaacctgtcgcccattcagcagcgcgtacgtgagattttcgctgtggccttgtcttgtgcaccagaggaagtatctcgtcttaccgacttttttgctgctggaggtgatagtcttagtgctggtcgaatggtttcgcaacttcgtcgcgaattcgctattttcctggccggtgacattctcttccaccacagcactgttggagagatagagcacaagatcattgaagctgttgaagttaaggctgccaagggcgacgatggagaagttgacttgcccggttgtgagaagacatacagcagcacgaacccaattatcttgctcctacacctgttaccgactgtgttctttttccccatgaaacgcgccttccaatggatcatgttcgcatatgtcgtggctgagtgctctaatcgatttcccattcgtgagaacctcttcgctcgtttgatgctggttgtttttgccgtgatgtctgctcgcttatgttcacaaattgtgtctcccatctttgctatcatctttaagtggctcgtcatcggtcgctacaaggagggcatgtcacccatgtggggcccgtaccatacgcgctggtggttgacccagaaggtattgcaggtgtgtggaaagggactcttcaacaactacaactggtcccgcattctcttctaccgtttaatcggcgcaaagattggcaaaaatgttaccatgtccgcgtccgctaagctcggcgagtatgatcttattgagattggcgataatgtcgttttggatacctgcatgtgtcgccccttcggcgtggagcgcaatacctctatgcttttgaagcgcattcgcattggcaaagactcgtcgatagggatcaagtctgtcatcgcccctggtgctgacatcccggagaggacctgcattggtcccaactcgtcgagctgggaacttcgggacgccgatgagtctaaccgccaattgctgacctcccagatccccaagcctcattggatctggattctctttattgttgagccaatcaagttgatcacctggacagctgctcgtattacctggatggccgctcttcttcctatggttctcgagttccctactcctgcggcagacatgttccggtctaccctagaatggtacaccagtgatcagcggattgcgttccacatcaccgcaaggatctgtcgtgctgttggtggcccgattgtgctttttattgcagtcttgatcatcaagttcttcctcgatctcatctgtggcaagcccagacctggtcctgcctcaaaacagaccactcgccaaaagattcggagtgcggtgcttgcgcagattctgcccgcaggtgacatccacggactcacccgccttactggtcgtcactacgaatttgtttcaatggctgtccgtgcccttggtggcaaggttggcaagcatgtctactggcctagtgttggtcccgtcactgtcgactttgatctcattgaggttggtaacgatgttgtttttggttctcgctcgactctggtcacatctgatggctacggccgtgatcgcatcgtgatcggtgatggcaccatggttggtgatcgtgtcgtcgctttgcccggtgctaccatcggccgtcaagcaatgataggctccggtgctttgcttcgccggaatggggactaccctgccaacagtgtctggactggtagcaagggtggtgaagctatacagttcccaagttccacctcgacctccacttcgaccgctccaaccatcatcggagatggtggcagcagccccaacactagcggcagcgaagacgagaaaacaccgaccgaaaagcagacctactgtggaactaaagacaaggctgttaccgagatcgctgagcaggaagtggatacatgcaagcctttcggtcgcgccttctaccgccacgaggccaactactacgtcctccgcatgtggcaaattgtcatctattccacttttgcagttattttcactactgtgtattggcttctcaccgtcttgttctcccttttcgttctccgcagtgtcctaagctacagtgatgctgctggtttcaagcaaggcgcctggcgcccattcgttctgtacggcacgctcgcctcgatcctatctgtcatcaccaccgttcaagtcgcccttgccttcggcattattctctgcatcaaatggacggtcgtgggccgtcgcaaggaaggctcctaccactgggacaagagcagctacaaccagcgctggcaattcctcctttcctgcgaaacgttgatcaaagactgctatgacggagttggtctcctgcccatgatctctggctctgcctacatttcctggtactaccgcctcttgggtgcgaacattggaaaggactgtgcgatacacgccaacggtagtcccagcatctttttcaccgagccggacctccttacccttggtgaccgtgttgctgtcgatgatgccagtttggtctgccacttgaactcccgtggtggattcgagctgcataccttgaacgttggggatcggagtatcctgcgcgctggatcgcgcttgatgtctggtgcttcgatgggccaggatgcttgtcttttagagcatactctggtcctgtccggagaccatgttgagaatggagatacgctccagggatggccggccgaaggatttgacgggaaacgtgtttagaagtcttagattgttttccatttcttggcgctttgtctttgtcctagagaacagatagactagcaattttagatcggacttctcagattttcattattgttatattgtcatcgagaagatcaagtgcattttaattatgaacagaaatatgccacttctatcacattcttatctgggaattactataccacacacccttttggaccacttcaggtaaggcctttcttatccctgttttgaagactcttttgaagactcttttttttacccatagacctcaactgcccattactcgtatttgtaggatcactataatctattatacgaatcacttcataatctagccggcgccagtatcatgcgacagcctttaattatcaattatttaccggttactttacgaactgcgttattatttcaccatgacggcttcaactgtaaatttcatacaatctactttctaactccgagcccaagatcgtcccgaatccctccccactcccccaccctcactccactttccgccccggctgtgataagaaccgagacaggccacgaggccggctccgacactcgtggtcggctccgacataggctccagcctccgacataggcccagtcgaggacgtagatactagaagggggaaaggcataaaaaccacggagtactccatagtataatcaaccttgcaagatacaaaaagggattgttacagggacccctccaattgctaattcgacccccctttgactaataggacccttgattctgctttattctgccttgcacataaggcaccactttaattctgccagccttaattctaaggcagaagaagaatcaagcggcagaatatatacccggaccttgccaagaccaggcaagtggcagaattctgcctcgacccgatcagaaaggcggtatgtactgaggtcaggtgcccgagattatctaaggcgtgccaaggcctcaagatcttatgcatctttggttttatttgcaattgccagttcctaaattccctgggattttggggatgttgttctttactttcctttgtgtattgctttgttgttcttgttcaaaatatgtcgataatctaattctaacccacctatcagcagatggaaatctggtaggttgaagtcctcaagatcaaccacgcaaagaaagaaatcgactaccctctggtgtttattcacaaagaagcctctaattaagtccaccaagaaatagcaagagaccaaagtgaatcatctttggtttctttgtcggtctaaatctctttggagtcgacatgatcagctttgggttttcggagatgctgttcttttccaaacatgccattggtctaatattatcttcttggctagagagtttataatcaaatcttaaaagcacccacatagactctttgatgaaactgtctggtttggatcctagttcttagatgcgtgttctaatgctaaaaatggaattgattctttgagcttatacttcggccttctggactcgggaccgacgttaccttgaggcatttcttatgggacttgcaaggaagctctcctcggatgcagctgtaaataagacgatgtccttcgcaatcgacaaatctaatacctattcccaatctcgagcctccctccttacctcttaccgtttccttccaaaactcatactttattcaccattgctttcctcgatatgcctgagccccagtggtctaacgctcaaatacctaaggggtttccccgagattggctaaaaacccacgacggctaaactgcacctatgccagaggtgcataagattcacctactgagttcaaattctgacgacactgatggactgaaaagctcaaagaccgaggatcctattgaacttccggttctcagcccgaacgatccggttaacgaaatgtataaagtggccctctcaacattcctgcacgaggaattccaaacaaactatatgataaaagacgaccctttgcattacgaacgacgctacgtcgtttggcccggcattgacttgaatagatttcgattaatcgacaccccagctagctttttccgagtgctagagatgtcgcttttgtccgaacatatatatgaaccagaagggaagaaatggccagtctcagccgcaaaaagacgcacgcgccttcttaagaacctttgggagcggggggatatacggcttgtcgatgagaagcccctcctcagtgaataccaagtgcgccgcgtggcatcgacaactcgttctgaagtcgagacatatcgagaatttcttcgttgccagcacttcaacatgggaaaagagatgattttccctgaactttgggaggaggaggaagaaggttggtattgggaggagaaaaaaaatcatttacatggctgtatacttgcttaatgctacctcgtgttctacatttctatttctctcagataagtatcttaccattgcctctgtcgctgcttgaactcctcaccccttcgtggattacatatctagttcgctcttgttaatgaatactctgggtctcttgcaatttcacttgtactttagcttgatcaaatcctatcatgatatgttcagatacacaaagaaccaagcaatgtaggattcagaatgtcctaccctctcaatcgagagagtcgttgcaagataaccaaacaaggaaaattgcgacaatttgttttagagtgcattgtcttagtctctcaaagcggtcgacaatggcctttggtttgaagtaatcagaatatggattaaggcataatccactaatttctatgggtgtaatacgtacacttagaaagacaagaagcggaaggttcaatggattcacacaattatatccactatctgctattcgcgccattgcgaatccgatatgaaattcgtcacatggaacttagaggagatctagttctttgaagcaatcactattgattctctttttgagacatccaactcatcatcgtgagttttacgtggacaaaggaaataataagcccagtcctgacgattgttggacagacaacaaatagcctattaaattgaagcgaaatgttgatatggtcgcatactggaacatgaaaccattgtacctagaatctgtgactatggggtacacgatttatcaattatagttgagactagacgtaataaagaaatgggttcagcacgtaaaaggctatactatataatttgtaagtactatcgctcatccgggggtttttattttcactcacttctccgatctcaccaaacatggaagttgttgctacggtcattagcatcacacgactcttccgacggttgcaagatcgggtatcctcccatgcatcctccattggctccttgctgcttgccatggatacgtgagatttccgtaattcaatatcaagttactgactaaccattcatacctaggtactatcaaaaaggattccaggaaaagcttgatatcaagattgatcgcctgctgctgcttcaggaaaaatctcggctacccaatgagcttggcacccagcaggttggcacggccacctctttgcccaacaaaagcaagccattcaccattcctcgacttgccactgacttttatcgagagtggaatgattaattcgaggacttgttgcaaaagctcaacccttctttggttgagggccccgaatactcaaatcgaatgatatatatatctggcgatgcaggagtaggaaagacatacttgtgttctgaatttgcggagaagtacaagacttggtagggattttaccctatactctgcttcatatatatcttactccctattcaaagtcactccggcgttctttggattgatgatgttcttaatgacatctcagcattttatgttgagaacaaccgatttgagagcctcaacatcccaacacaggcggcagatgtggttaactggctgactggggttcatgggccatggcttttggtcattgatggcgctgaagatttgacaaaatggaaatgtctttcgtcttgcggtgacaaaaaaacactttcttatcacgaccagaacaacccaatcggacaccgctacctctgttcatatctcagggatggacactaaggattcacaggaattccttttgtgggccgcgggtttcttgaagccttggtttgtctcggatcttgcgtggagtaatgatctcattggcaaacttggttccaatgcgctaccccttgccttagcccatgtgggtgccacggtgcgcaatggcttttccaccccagaagactatctggcgctcttggaagagcaacagacaagggaaacacaagcagatccttcgcaagatttacaaaggttggcctttgaagtggctatcgcacaaattcgaaaacaaaaagatcagccatccaaggatgcacacaaactcctcaacgctttcgcctttttccccaatagacacatgtctttggagacagcaacaaaagcaatcatcacatccaggactattggcggggagcagcgacggagataccacaagagatatcccacatcaaaactcatcagacggaatgggaaagcctacaacacttctcaatctacatctcgtcggcaaagctcggattctgttgccctttcacgagttcactgggcgatcatggagctcctcgatatttccgcggttatatatcgcccaccaagtggtacatactcgatggaagctgtcttgaaaagctggatcgcagacagcctaggtcaatctgagcgcgaagtttggaaaaacttagctgacatgatagccccgcaaaaggcgtccaaagaatccctttgatagttttttgacagaatttccttgttccggatttagtttgttgtgttttcccttcttttcttcagtgtgagttggttatatagtcgaatctcataatcctatcttctagtttttccaatcttccagctgtgacgagccaagtcttgcaaagatggaagagtgcatcaattcaaaataactaagataggggagaaagaagaagcaaggtgcaaagtgggaaacagccagttcttatagctgaccactttgtagacaatgtaaacaaccaaagaaacaaacaagcaaacgttgcgatcgtaacaccagccttcattcttggattcacccatttacctagatatctgcctgatgagacttgaacttttctcaaaccttcttttcatttattgaagatacgaaggtgtatagcggccaacagccatgcctgattttaatggtttttacggagcccgttgatcaattagtcaacaatagtcttgtgcaagggatttctcatagtcaggaacattttatatttcataccagtaattagtcgtcgcagagcaaagcgacttattctgacttctaatgctacgcaaagtatgactgtagaagctctgggaaagataatgatggttcgttctctaggtatggaccgtcgggatatgcccgagaggcccacgtgaccgtatgatcacaatctaaccaaattaggcctagtctatatttattctgccaaaggacatttcaccgcatagtttcccatgaacttcgaccccagtgaagaagaggatgttcacatgacatcgagattatgattcattgttgctttgcttcactccgcaaaaagtataggagctagttttcttgaagttgctgttatataagccattcatggaggcatcttaggcacctcaccaatgaccaatagcgaaaacaagaatagactccaccctctagggcttcgaagagccactgctcacaagacttctatatccttccccgccccgttgctttcatctcttaaacgcatcgagtggaactaacttttaaataaggatcatacgggatttcggctataccatgctgcaagtgagagtgccacgaaaaggtctagcctatagtgatgtctgagtaccatgcacttcccggtgatgtgtccaatttcctccagtagcaatttccgtctgccgcctcttgcgtaaataagattttataccccacgccaacaggtctaccccgcaaaattactatttagagcgctgatagtgcggggatagtagactaatgcactgagagaacgccacaatataggctgaatcatgtttcccggccaatccgaatctgagtgaatcataatatcacttcacttcattagactctgttatgtacggttctttagagtttgaagcaattaccgattattccgcaacaaattttgggaagagaaacagctaaaaatatggcattgaacgcagattcgttccctggtatacaattccgtaagccagggatatgtacatataaatgggtatagctagtaacgtaggataatatcgagagaactaatattctcgtcttttgccggatgagttcaacaaactacttttcatcccccacgcagacgttccttgaccataccccgcctaggagaatgggggtaaagggatagcaaagattcctggagatattttcctcgtatagaatctgtaagagattggtctcggcaatcaaatgagctgatgccagccgtacatgaaatgcggggaacttcacagaaagcgcttcagggaggtattggctttgggctgtttgagatagtcaacctgaaagataggacataatgatcagcagtttctctttcaatgtgctgcaatggtcatgtttttgttattctcaacatgctgatacagtgtgtttgactggacagagctggacaacacattacttggagtgcgttggatcaacgtactttttgacaaagatgagtctgatgttagccaccctccagtacttgaactctgtctccgcgcgcggggtcaatgtagaaggctattggctgtgcatatgggttgagatggggaaattgcctctgtagatacttccacgggcacacaagcacagctatataaggcccctctggtaggtcccatcagaagtctacttattccctcgagcactttcttcataatcattctcaattgctatattgtcaacatattcagagttatgactatcccagacgaagttgatatcatcatctgcggtggcggcagctcgggatgtgtccctgcgggccgcctcgcgaatcttgatcacaacctgtctgttttgttgattgaggcaggcgaggataacttgaacaatcaatggtgagaatgccgaggctaccagtcttaatgaacgtattctcatttcaacctagggtgtaccgcccgggtatatacccgaacaacatgaagcttgattcaaagacggcatcattctatcactccaggccatctgagcatttagatggtcgccaggctattgttccatgtgccaacattcttggaggtggcagttctatcaactttatggtaagtgatacctatctgacagtttgactcagtgatcctaagctgaatacattaaagatgtataccagagcatccgcgtccgattatgacgactttcaagcaaagggttggacaaccaaggaacttcttccattgatgaggaagcacgaaacataccaacgtgcgagcaataacccggaattgcatggcactgacggacccatcaaggtttcatttgggaactatacgtatccgatcaagaatgacttccttcgtgctgctgagacgcaaggaattccattcactgatgacctgcaagacttgaaaactgcgtacgagctccacgatagatctcctattttatcttactaacgaagagtcgtaatgttacagccacggttcggaacactggttgaagtggatcaaccgtgatacgggtaagaacgaaggtccaactttgcatcggtatcattacctctctcacactcagtattaggacgacgaagtgatgcagcccacgcctatgtccacagcacccgagccaagcataataatctccatctccaatgcaataccaaagttgagaaggtgattgttgaaaatggtcgtgccgtgggagttgtgacagtcccaactaagcctcttgacggcggagagccagttcgcagggtcttcaaggcccgaaagcaaatcattattagttcgggtacactgagttctccactgattctccagcggtccggctttggtgatcctgagaagctgcgccgggctggggtcaagcccctggtcaacctaccaggcgtcggccgaaacttccaggaccactaccttactttctccgtttatcgcgctaagcccgacgtcgagtcctttgacgacttcattcgtggagatcccaaagttcaaaaaaaggtcttcgatgaatgggataagaagggcaccggtccattggccactaacggtatcgatgccggggtcaagattcggcctacggagcaagagctcggcgagatgaagaagtggcctaccccagactttacagaggggtatgagtcgtatttcaggaacaagcctgataagcctgtcatgcattactcgatcatttctgggtaagcatctcattcgcttcgttttgaatgccacgaggctaacccacggatagctggttcggagaccacatgcacatgcctccgggcaagttctttaccatgttccatttcctggtatggttcaaagtcaccaaatcagatcagccaaagctgacaacataataggaataccccttctcgcgcggtcacacccacatccagtcggctgacccttacgaagtcccggactttgatgcaggtttcatgaatgacaaacgtgacatggcacctctggtctggggatatattaaatctcgtgagaccgcccggcgcatgggttcgtacgctggagaggtcactgccatgcatcctcagttcgccttcaactcatcggcacgggcgcaagatatggatttggccactaccaaggcatatgccggctccaaccatatttctgctggtattcaacacggtatagtcttcctttccagtcgagttatcccgtccgtctagctaatcaaataatataggttcttggaccactccattggaacccggaaagcagccttcggcttcaactctcaactccaatagacacgaagctcgtccttcgctggagtacaccaatgaagatatccagcacattgagaagtggagtaagtatcaagcatagtaattggtagccccggatcatattgtctaacgcttttgctgcagtttcccgccacgttgagacaacttggcattgccttggcacatgcagtatggctccgcgagagggtaattccattgcaccccatggaggtgtcgttgacgagcgcctcaatgtgcatggtgtcaagggcctcaaggtttgcgacttgtctatctgccccgacaatgtgggctgcaacactttcagcgtgagtgttatgtttgttggttactctgggtttggccaaatactgactattatatccgatagaccgctctccttatcggtgaaaagtgcgcagtcttggttgcggaggaccttggctattctggggccgatctggatatgaagatccctacttaccatgctccagcagaattctccaatctttctcgcctttgagtttcttttttgacgtgaaccgaagaacatgttctaggatatttcattctattcggcgagaagaagttccgtcctcattgtcaaattgaattaacatagtcatttcactgaacagttaatctgaaaataaagaaccaggtaaaccgacttatattagctaaacgtcatagaggaattcagaaacgagaggaagtggagatagacagttgaagggaagatggcatttgtgatgtgtatgtatgccttcggccgctagtgttggtgcctcagtttagtctagaccaggtaactagccgtcttacagtactcataccataccatcccacggctaacaactgttagttgactatggacatcttccaaggttatgtagttactagcccccgactccctactaggaagttagtaggaactatgtaccagtactaatctagtgatagctgactggtaaacaaaactttattttcctaggccaagtacaatatatgactgttcataagttttaacagcccctagccccacacccctgatttatataatattctgcctatctaaaacaccataatagtacagagtaagtaggggtgacggcgaaaagaccacgattgtgcgtggtcttttgaggggaaatcgtggtcctttcacccagcgctcgcgttagagcattgaatataatactagccaagttaggcttagcgcccttataggagtaagtatttatcatatatcaacgccccaaatcaaaagcggtaaggcgtgggcggcaaggcagataattaaatcggtgaatgccaagacggcaaaacaatcggccgcatgacaggcgaaggggcgcttcatctccaatctcgagctcccctgcagctgacaatccggaaaaaggagaccagcagtctgatatgttccgagtcttgcggcgattgggagtcccttcgccaatcattcagcattgtcgatttcgttgcccatctcgaccattatccgagatgggaaacaagaacagcgcaccttcgccacatacctggctcgacagcacatccccaggaacagatttgcaagaactgactcgtcgttagtagcttacactcaccggaattgactaacaagttagtatgtcactgactttgtattgtaggacatgatccgcattcgtattccggtggaagatggctcaatcgggacgagctcgagcgaaactctcgccacgttatgtttgacttctcagcgctgtgtgagcgggctgttcacacatgtctaggagccactagagttgtcaagtatgagaagcgagaaggtggattcaacaaagtcttccttttaacaatggacaatggaccttgtgttgtggcaagggtacctaccggtattgctggcccgccaaggttaacgaccaactctgaagttgcaacgataacttattgtaaggctaagccgcatctcctttcattaagggtatggctgatatgcttacgaatttatgtctgtatagtacaatccaagatgtcgcttccgataccgaaaattctcgactggaatgataatccttctaatccaactggaactgaatatactatctaggagtatgtggcgggtgttcaattatatcaacagtggcacaaaatgaacccggaacaacatatgctatgcaccaaagcactttcattaacaatgaaaaagatggcttccatagacttcccggcctatggaagtctatactttgcagatgcgccgctagactcggactcaaagattccctttgagcagggcttctgtgtgggaccacattgcagtccggttttctggaaccgaaatccgggggaacatgaactctaccgtggcccaagccccaattgcggaccttggagagatctcacaagttattgtcgaggtttgatagataccggtttttctcgtttgcccaaagaagccgtcaatgatcgcaagcttctgccatatcaaggatcaattgaagatcacatccatatattgaaaacaagtcgagaggtgatacaaaagttgattgaagataaacgcattcaggacgctgctacaccagctctccttcacccggattttcacaagaggaatatctacgtctctgccgaagaaccaaccgttattactggcctgatagattggcaatcaaccagcattgagcccgcgtttatttatgccaatgagatacctgatttcgctgcactcccaaggatacccgaggaagatcgactcgagaatgaacaaaatgaaacggaaatttctggacaaaaggaacgagaattaaaagatgcatccgtctgttatcagacatatgatgtggtcatgacagcccttgttcctaagctccgtcctgcaagattacttgatccgactctttttcgactcttccactactgtcacacaacttggagagactccgctgtcgctgtccgccaagagttaattgagctttcagctcgctgggtggaacttgggctagagggctcgtgtccatattctcccacagaagcggaattgaagcagcatgctcaagactatgaagattttgaggctgttcaagcactcaagtcatggctaagagacaaccttgatacaaattctgacgggtggatcccgaatgatgtatgggacactgcgagggttgctcatcgcacagcgtatgatgaatggatacagactgccaaagaagccgagtcgcgtggcgaagacatgacagtagcaaaggcggacaagatgtggccatttgatgctagatagaaaccaggggaaggcaatcaaaaagtcagctcactgtctctagtgcctagtctaaacccagtccagcccttacgttagtttttttacgttaggatatgacggcctgatgtttgtttctgtctggcgaggcattttttaagcaaatctcgccagttcctaggagtaagcagactgtccctgggacgagcatgagtattttccgcgggactgtccagtaagtctcttcgccagatcggaaacggcaaaactaactcgaaaagacaattcatagtccttaatttatttacattgtggtttggtgcaagagaaaacgagggagtggtctaagttcgattaggatggcatttcttacgtggcatccgccaaagaacgcctctgtttcttgagcgtcgtgctccagtacacctgtatggaccctttactcctcccggcgaatttctgtgcaaactgtctcgtgacctccgaccaagcaagattctgttccaagaattagtcttggcacatcatcaatacattgtgttccctccaaaaaggccttggtatcttacccggttgacaggccttacacctgcataacgtatacctttacattacccattgttctataactcgagacaaaggatgatacacagaagagtggactaatataaagatatactacctctatctccagtctatatgacctattcctatttcttcttctttttttctgtctagtcctctatactaatcgattgtaaagttaataattttagtcataaggcatccagtcaattgagctctactaaccagtcattccataactaatagattaataatagaccagccggctaatatatccgtaaggcagaggcatagttcagcgtagtagaccaaaggcaaaaataccttatatcgagtatattcggcgattctatatatagaaaaggggataggcgaggcaaagctacatacagagcgctcgagaggtcgaacgagggcaaaggactagtcatttcgtgccggtaaccgagggggcggtagggctcggcgagctagatcaatagcaaaaatgccttactggcaggacgcatataggatgcagatagcaggaaagggaccgtaacgggcgaaacgttcagcgagtaacagtcggggcgatgaaggcaactttatagaaacacgcacggcgatatcagtcatgtggaaggagctagacccaaagaggcacgctaaaccgaaattggtaattcgccgtcaccgcagagtacggcgtataccagcctggtgtgtggcggtatagaatgtataggaaggcggtatataggtggggctttagggactgttaaaaactcatgaacagtcactgtactcctacatctgcagatgtatcaaaaatacatggattaaactctaatgcgtcaggtcagtacggagtacttgtaccagaatctattgtcggggttcttatttcttaacaacaaccatgtctgcccatctccgcgagatctctgaaaattccgtggcttcccacgacacagagttgtctgaagatgctcgtctagcgagagccacagaagaaatgttagcagtcacagatgctgcaacacaagatcaagacatacttcgacggaccctgagcgtgcattctgtcatatcaagctctctaagcttcgcagagcgtatgcagcgggcgaaatggtttcagagtgctgcgctagttgtgatcgggcgaggaacatgcggcacggtctttgagattcccggaacaaaatctgcatacaaaaaaggcagcgataagcactcgttgtggaacgacgcaaatctgaccaacattgcctgccgtgcagtaacagagaccaagacttctcttcaggaaatattcccgaatgtctcgattcctcgtgtgcctgaggtgactgggtggatcagtcagaatgacttggagaactggtggctacagaatttgtcacgatttccagatgatactcaaactggatatattttccaagtccagcggatcctgccgcttcccaagccctcccgtgaagctctcattcgcctctattttccgaagaaattgcgccgttctgcataccaagacccggataataaggcatgtcttgttcgaccataccttgggcagcgaagaggagagtgggaattttctagtccagtactcagccttcagaactttcctctttatctcgatcagatagaggaactccagttagaagctactcaattctctgaagagatggctgttgggctggctattatccactggagggctttcttagacggtatggacatggaattcgtactcggtagtgcgacagcagatggagaacttcccaccgttgttgagaacttcaagacggtgaaaccctttgagacccctgctggtgatttcaaaagacggcaggtgcatctatggatgcttgacttcgataaagctgaccagcttaacctaaaggagagctggaagtcttgctgcgataagatggtcacagctgtgacagcgaatgacccctatttccccaacccagcagccacgggaactctcgaacacaagttgtgggatacatttgaacacgcttatcttcttgctgcgtctaatcttctgcatatacagagagggttgccaaagaaggcgaataaatacccagctttatttttgaaagcatgggagaagaaagctacagaactggcaaaggacacagagggtaattttgtcgaatttgggtaaaatcgggttttatgaatgacgccttttgctgcagcccacttcgggctgtctttattctgaaactggttgatctcggctgtttcgccacaatttcactgtgattagcgcgctttttcctgacaaccgagatgattggaacttcacttatattttacacagaatggtcggaagccgtcaagcctcctgttggggtagatacccctatggaccaattctacgcacgagagcacgttaacccggccagcattgactttctgtttgaaacagtacctattgatatccatatgacgaagctttgtatatattaatgctccttcttttattaatagatcaacggtctgctggttatctgagcgttcttggagtgcccggcgttggggaattgattcgaagcgtcgaatcgctccacctacttccaagcagtgaatagcatgattgtatcactgcttagcttatatgcatgtcggtttacacattttgtatctctacccgatatggtgaaaagtagtgacgacggagtgcgcacaaacgcaaagtagtctccgtacaacaacactgcgatggaatttattttcctttacagcacacctgtttatattctgcggcttatacttgcttccgaatattaactttaatcattcatgtcttctctattgggagcacgctgttagctgccagcaaccctaccacggcgcttgcccagtctatatccaaatcaaacgtctctaaccaaactgggacgcgtttcttgaaaaacccggcatggatgttaatctagctaggttttctaggccatctatgaaatctcttccaaatcgacaatagaagtatcctgatcccttgatccacgtcgcactggtactagctcgaccccccatgcaatccgtgcacaagcagttacaaacttcggtacaatacctcctagattgaccatctgctcaattccttgccgcccaccatttatttgagcatgttagtcaaagcagattactgtccgatatgtcaatctgacggggtggctacaatgtgttcgtggattcggtacgtcatctcgatgtcattttatgccaacttctgttctgttattttgccaaatataaaaggtcggggggtttgcaagtttccatttcgatgatttatgatagtctcggttcctaaccagcctatatcctgtcacaatgccttctaagaaagttctcattgtcctcagtgacgcgcactctttccctctgaaaaagacccgcggacacgatgctggcaaggttgtcgagcagccttcgggctttttcctccaagagctcacaaagccgttacacaaaatactcgacgcaggccatgaggtgacattcgcttcaccgaaaggtcatgaacccgccccagacccaaacagcgaaacgctcattgcaaatgccggcaacttctatgaacgtcaacgcgcaaacgatcttcttgaacgcatgaaacgcgagaatgggttcagtaggccgcgaccattcagtactatcagtaacagtgagttggccaccttcgcgactgtcttcatcccaggcggacacgcaccgcttgaagatctgggagaggatgcagaactgggacgaattctgcgttatttccatcaggagaacaagccaacggctgtgatttgtcatgggccttacgccttgttgagtacgaagaaggcgggagatgggtcatttgtttatgatgggtacaaaattacgtcgtggagcgatgtggaagagaatattatggagacattatggggtggggaggtcgagaaggttgaatcggcattgaggaatgaaggtgcagtcatggtggagggtgtacatgaaataaccggcggtaccacgttggatcgagagctggtgtctgcaggtaatcctttggcggccaatgcccttggtgatcggtttgtgcgaatgatcagtgtataatatcttgttttccatctggcttgggtttggctcattatcttggggctataatcaagttttatggctagcgtaagtgtaagcttggtacaattccttggaaacaaatccgggaggctacaatgatgtaacaattaaagcacacctgagctcatatactgctctagttcaccaaattcaactttcctttcattcatacttccaatatacctcgttttaagtattacttacctgtatccttatctttggaccttgagtatgaactacatccgccattcatttccatatgcagcaatgagacagcatatccgcccatctgtgggacttcgatcacctgggccggctttcagtcgaagatgtttcgccagcgaaaagccgagtggccaggcaaaaaacccccggtggttagtctccattttaacatatgctacattaattgcatctgacttacacttcatcgctctcaataggctactggtatcaattggtctcgggctaccaatatcaatctacctgtggcagagaggtgatacaaagaagcctagcagcaagcctcatacacaaccacgtggagcaaaccaagagtatagtcaggaatcagaggccacccaggctggagtacagaatatcaaatcgggatcttctggtggtgatgtggtttgttattccttctcttattgtgttgtcagggcctggttcgcgttatcatcatttaacgatccagggtattgggagaatgcatatctaactttcacatagcctcgaggcatgggtgcgcccaatggccccggaagcatatcagccaagcaggaaggcctctctaatgcggataccatgaacccatatgtgaacgaaccaggtaagagtaaaaagggcgagggtgagacagacagtgtgaaagcaaaagggaccattaggccgggtagacctcaggtgtagtctgcgctaaaacctatcgtcaccggtcttgaaatttaatatgcgcgctatatgtattgctttatgattttgttaggttacctcgcatcgcagagctatggaacaaaagtgggcgaagttgagccgttcttgaagatctctatcagtgatttccttttgccgttagactatcttcagggctccctacctatcaaatcatgagctagtagagcgaatgactctaagcggggcaccagtcaggcggggtacaaaagtcagcaatttttcgcccaacgcggtttacttcacttctcccactttccaaatattatcgctgaaacaacaaattacttcgatcaaggtaggctagggctgtgttttgtttgcatctctcgtggggaccttggtggttgctgactccccgtcagatctacttcatcaagtcatcaacaatgaacggacacgctgcctgccccaagtgcggtgtcgccgctgacggcactggaaagagctgtggcgcctgcggtgctgtatgttgattctgcactactgctgtgcgagcttatactaacccatattagacctgccctgtttaaagcatccctcgggtgtggatgaacagtatcggagttgagactgtttgtggcttagcgatggcataggaggagccagggcatgacttggatatcaatatgttcatagaaatgatatgatgacaacgataatgaactcaatatatccgaaaccaagtacgattgttatgtacgaaaacaatagaaacaacgtgaagacattcccctggaatgaaagaaatgtaagactgttcccagccgagaaacaaccatcaggatatagggtgcgtaataagaatacctccttgtctcgttcctcctaagccaacagccaggcctgggactccaaaatcaccatcactccagtagagggtcaccaacatcccacttcatcacggaccaactatacaccgcttagacaggtccagcggttttgcgccactgggaccaaacaccgatcaaactgctgacggtacctgcgataccgacgatgccatcgtcgaggttaacgataccaacggcagacaagggcgcagccagatcgcaaacatcggagatgagctgtatccgagcagcagagcgctccctaatcagattcttagcatgccatccatttttcattctgggaataagaaacccatacttctcaatcttcttagcctcaacaacaccctcgccctccttgcggtcaatagtcttctccttcgcctggagacggatgagagtgtagacaccagccacaacactgaaagccagcccagtgccccaagagcggtaggcggattgctgcacccgcttaacggaaggcagcttccgaatgccaaccacgtcgatgactgtgatggcgtcgagagtcaggtagctggcataaccgagctggcgaccgatggccaggtagcgcaggaccgggtcgacggggttcttgttatcgaaagcgacggcggcagccttgagatgctcgaggaatttgccgagacgcataatcttgcgagtcgtgccgaactgcttcttcacggcattgtaggggtcgatcgcggactgcggcttgtttgtccggtataggtaccacgcatagaagcgggagaagtattgaattgtgcggagaagcttgtcgcggccggctacatgttgcatggattattagcttgagtggtcgggtgaggacggggagagctcagctgagcttctcggccgaatgctcgccacatggggtttttgctgcagccgtaatgcaaagtgggcgtcttttctttcgtgcacagatagaggcaagggatgttgctttttggactctggggatgtatcacgtaccggttgtcgcgacgaagcgtagccagtgcgccagcgcagggtggtagatgagagtgttagcgaccattttgtctgttgccaatgagaatgaagacaatgcaacttcgaacacctgaggatgaagatgtcaagaatcaaatgtgatagttcacaagggaaaagggagtcggtaattgaccggcgtctggggccggaagaccgacctcggctgatctcgtgtgtgtgggggaagatccggaggtaggatgtaatgtatttactattaatacgacattcatggcattttagcccctacttatcatgcaattctttgaaataccttgaaattcttcggtatttttcacatgagcctgcgtcatcccattctcccgacattcatctttatcttttatgctgaagacgaccttcggaccttatatacaaatccaaactacttccaattgcatccgggcacaatcttagccctttcagaatatatccctttagcattgtaatcttaacgatagttgtagttgttgtcagcattactctatcgccaaagggagagtggaaggggctatttgctacatccctggtttgagagacgacaggcatccaagatcggagtaatattggaaggggaccgtgcagtaaagctagagtaagtccggggtaaaacgccagaacacaaagagcaatgtcccaagtaccttcacatgttgcaagtcttcgggaatacacgaggataccaggaagcaacagtatcaaaatggctgcgactgttttacagtttaggatccggaccacggtagcagaaaaagaaaacgaagactggtacatagtggagccgttttatttgtgggtaatatcgaagtccccaacttgaattagattgtttgtcaaacaagtcaggagttcggcttctgtcttgcgaaatgcatcactggcagatcagaaaggatattccctcgttgctctcatacattcatgggtcgtgtcgcaagggcaaggggtgggtgggatatttcaagtcgcaagggccgggtagtcgctgtctcgtcaatggtatctcgtttactggttgtgcgatgccgcgtatggatggagtgtgtgggattaagtagggctggttgaaacacaacagcccaaaagggtgagcaggtatgtgttgggcgcggtagggctcggattactgttgttcgcgggtgtcggtctggcggttatggttgcccatttccgtggtatcgtagccattagcctcgagatagtcgcggaacctggcatcctctaaagtaatggtgtcctgagaaaaggtgagcatataaacaaggtactctatctgcaacagttcatacctggttaatctgcggcatcatgaaaagggccataaaagcggccaagatacacagtgagctggaaacgaagaacgggtcctggcctgcgcgggtcgcattgggtgcgttcttttgtataactggaatcacgtaggtgcccacaaaagccccgaccttcccgatagcagcagcatatgaatagtactggccacggatagcagtcgcgctggtcttggcggcgcagagaccgatgttgtccccgggtcccatttcaccgagagcagagaagattctggtttcaaagtattagcattggcaatcgctaacgtctaacaactctgttagtaaacttacccgaatacgacaacaaaggctgccacgttttctggggttgcaagccacttgtagcatccggccatgatgaacccaatgataccctggagcccaaccccaagggcaagggtgtagcgaggaccaatccagtcactcacgaaggctccaagggcggaacctggaatgtagaaagaattgaccacggtagtccaaccgaagctcttccacaagggagccttgtcacctaagatgatctgtagccaggctgaagaatagataccaaagctgtaggaagagaagtcgtagaggaaccagataatagaaacaacggcctatacatccaatcagttagttggttgaagtctgcaaaggcaacacgtcggtgggggttgttaccaagcgcttccaatagaatctaaacccgttagtcaacgagtccaagcagtggaaaatgttgtactcacttaataatcagcaaggtcggaaacttgtgcatgcgctcccggttgaattcctcgggctcattcatcttcagccgaaggtacatcaaactcagaggggggattactcccagccccagtgccacacgccagcaagcatgcagatgcttctcggtgaagatcaggacgagaatcatagacaccaaagcagcaaccacgaaaccgaaatcaatctgaaagttggtgaacatgataaaccagcgattgcgatggccgctcttgagctctccggtgttctctgcggcgccgactgacccagcagggtattctccgccaatgccaattcccaggaagaaacggtaggccgtcaaagcagcaagcatgccacccaggctgccgccagctccataggagccagcaccgagagctgcaaagacaaagaggataatggtggagatcatcaaagaccacttgcgtgaccagtgatcactagtgtatccgaatatcagcatacccaccacagtgccggcaaaaacaatggaagagacattctgttgggccgtcgatttggtgtattcatccccgtaaatctgttgcagcatagtaccgacgggaccaatgacctagatccaagtgtgtcagtaaagagcgagtagcattgaagctgtggggctgcatccacgaggacgaaacataacatacctggttcaagtaaccgtcagagaagagaccagcaccacaggcaatagtgggccaactccgttcccagcgccctttcttcgtctcgtcaagaggcggcagctcgacaagctgctcctcgaggggaccactgcccttctcaggcatctccttggagtaggactgatcctcggccattgcaagggtgaggaatagcaatgagcactttggctgtgtttacgcggcgagcttgagcttccctggaggcaaggatagcaaatttggcacgcgcccaacgatatttactgtcacgcgatcacaataacaagagccgcgtcgatcgaggggttcttattctctcaaccgaggaagaagagattagaagcagagagaaaagagagcgacacctacctagagggtaaaaaagattgtcaatccaaaagaatattaaaaatatattaataaaaacaagaaacgggaatagcatcactctaactcgcatggggacaagtaccgggtacctatcacagagtagcagcgcgcgcgttaagccaagtatcggagacctagtgggacccggtccccgagcttgatcattctaagcatttagctttgagaatttcagaagtaatatatttgtaggccaatgatagacaccataaatatcaaggtccattccctagccaatcgtgtgtccgtctagagtgaccggtcggggtaggttgcatccaacaacatagtcggccactccgcacgttctactcaccataaggcgatgagttgatatcggtatcaaagtgaacacgcggcttcctgttcgaatcagatatgcaaaccagttagttatctcaagggtgtggatgttgatagaagagtgcattttctacggcgcacgtccgttgatagttccccgtggaattgtggctacctatttgtgtggagtagtctcacatgaaaaagtttttgaggctgggatccaatttcctaaaacagcgagagatacatgctctaacctttgtttgctcaagctcaccaagcaggcaatggagcttcgaagggtttccatgatttccatgatttctaggcataaaacggttcagccctatgttgtatatcaccaccccatatcataaatcctcgggcttgagtcttgaacgtaatacaaacacatagttaaaccatgcagttgtaattataattgccttcttctagcccaagctaagacatggaattcctagaatctccagtctgaatcttcagccgatgcgagtactataacgctgagacaagtcagatatattacaaacatatatctctctcaaaagtgaggtataagagtagaaatatttctttggcataaagggacaaatataatttgaagcctatagatgcgaccggggtctagcacaagtccaacgtagattatcttagacgttcgaagggagaacgctaaagaaggctcggcacggagaaacattccgccagctgagctcgggctacggtgatgcaccttggcttgatctcatccccagacatcaccagctgccatctttcccctgctctattgcatcgttttttaacacttgtgggaatcctgtcagcatctccagtttcccatcgtcaccatggggtctgatccacagtacatcaagttccccaacctctccatcgcccaacatgtcttcaatctctccaacccagcatgcgcgccagctgtccagcagagctcattgaagaagctccaagaggttatcttggagaacaaaatggcccccttctaccggcatctagcccatcccactgaaggcatcttaaacaactccggcgaaggcgtaacacagcacccacacaatgggggaagctcagcgaagcctctcatcacgtccaatcttcttgcgtctcgcaaaacaccgctaaagttcgatttcccttgggacgagaatctctaccagtctctactagaggataacaagaaagaactggagaccttccagaaggaggaagacgatgcggaagaggctgctggggagactgaggtacaagctgcgcgcgggaagcgagctgagttctgggctcgcgtgggagataaggtgagaattcttcgtccatgttttgctaagcttcttggttttgttggctgacactagtattttcgataggacaaagctgtcgaatcccacgaagcgctcctcgaaaagaccggattcctgggcaccaagattgatctggtaatggctatgctccgcatcggactcttcttcggcgaccttctgtttgtgaacaagaccattgaacgagcagagaccttggtggagagtggtggagactgggaccgtagaaaccgtctcaaggcatacaaagggttgcatttgctcaccattcgctcttacagccttgccgctcccctccttctcgacagtctgtctaccttcacaagctacgaactttgcagctattcttcgctagtgatttactcagtgctcgcgggatccttgtccctcaagcgtgtggatttcaaggcgaaggtagtagatgcaccagagatcaaggccattcttggctctggggaggaccagctggctgctttgagtggggaaatctcctcaggcccaggtgcccgggatgaggagatgaaggatgcaactgcgtcactacccacacccgccggtgccaagaccgctgtcaacatctcatctttctcaacgggatccggtgtgccagtagaggctgaggtacctgttgatttcgcaccgctcgcaaacctggttaccagtctctacaacggcaactaccgctcgttctttgtggcactcgcggccgttgaggatcagttcctgacacaagaccggtatctacacgagcaccgggcctggtttgttcgtgagatgcgactgcgcgcctaccagcagcttctccagagctaccgtgtcgtggcgttgagtggtatggccaacgacttcggtgtgacggtagactacttggaccggtatgcgctgcctaaatttcttcaaatatcaagtcatttgctgaccataactacagggaccttgccaaatttatttcaaacaaccgcattgcatgcaccatcgatcgtgtcaatggtatcattgagacgaatcgaccagatgacaagaacaagcaatatgctgatgtggtgaagcacggtgactccttgattaccaaaatccagaagtacggccaggctgtgcgtcttcggggaagtgagcgaagctaaagtggtacatttacaaacttggaggcattcgaagcctcacaaccacaacctatgatcaactatgtatgcccgaatagacaatcttacttgccgcatgttctcaaccccaggccccgtagactatgacatgccacccatggcatgacatccatagacgatcagtcccttgactagaagtccacggttagatccttttagatccttcaaaggttaaacccccgcactgggcacggaaaatgggtcgacatcgggcaaccatctgacctgactttccctcggagaattatcgtcgatcgatcgtgttaccatgcatgaacgtacgcggtagttctcatcatcgaccaaataaccgccgtagccacgtcttccgtgcccaggtggtctccttgactctaaatagttcaacgtccttatcgtgatccgccggatgtggagaaatgctgactcacaggttcaccgccaaatggccaaggccattttttcctcccttcttctcccgatcgcaatcggacaatcacgacaggggttcgtgctaaagggacttttttaattgaccaatctaatccttgattgacgattcgtcgaaatgtcctggcaatataagctcgcatccagcgtgcgggcctttccgctacgggcacagactagccggccgcataatggcctcctatatcgcccggccgcacgtgccgctgtggggggtgtctctgccagttcaggtacgttggatcccgagatggagtttccggcaatccttcggtattgacccgttgttctgcggtataattactcgttttgaccgtatccgattctgtctccgcggcctttatatacttggatctcctcttagtttcggggatactagtctacttattctgaatctcactaacctccgggtcgaacagagtccatcatgactcagacagcctcatatagcgcgcagcgcaacctgtccaccccgacccctaagtgcctgaacgtcgataacatcaaccagaacgttagggatgctaagtacgccgtgcgcggtgaattggccgtcaaggctgagacctaccgtcagcgtctgattgatggcgacaagtccctgccatttgacagcgtcatcttcgccaacatcggaaaccctcagcagctcgatcaggtgcccatcaccttcttccgccaggtcctcagtctcgtcgagaacccattgttgttggagaacgccgaggtcctcaagaagtcatttggatataagcaggatgtgatcgaccgagcccaggttcttttggccaatgtgcagagcgttggcgcctacagccacagccagggtgccgcggggatccgggatagcgtcgccaagttcattgagaaacgtgatggtttccctgcaaacccccaggacctgtttttgacttcgggcgcctcgtccggtgtgaacaccatcttaaacgtcatctgcaacactcctagtaccggtatcctggtccccatccctcaataccctctttacaccgcaaccttgacgctgttgaatgcccgctgcgttccttacctcctcgacgaggagaaggcatggggtactgacgtcaacacgatcctcaagtccattgaggacgccaaggccgccaagaccgatgtgcgtgccgttgtcgtgatcaacccgggcaacccaactggtgcctctctgagcgctgaggacatcaagaatgtccttgatgtcgctgccgaggagagcttggtggtcatcgctgatgaggtgtaccaaaccaacgttttcaagggtgagtttatctccttcaagaagcgactgcgcgagctccagcaggagcagcccggcaaatacgacaacatcgagctggtctcgttgcacagtatctccaagggtatggtgggtgagtgtggccaccgcggtggctacttcgagcttgctggcttcgaccccttggtccaggagcagatctacaagctggtcagcattggcctgtgcccaccggtcaccgcacagtgccttctcgaatgcatggtcaaccctcccatcgagggtgatccaagcttcgagctctaccagcaggagtacaccgatatctcagaaggtctgcgcaagcgtgccttttccttgtacaacgccttccagcgcatggagggcgtccacctccaggagcctcaggtacgtattctagagttattcaattttttacgcatttcctaatcgtctcgacagggtgccatgtacctcttcccatctattcacctgcccgcaaaggccatcgaagccgccaaagccgagggccgtcccgctgatgagttctactgcttggccctgcttgacgccacgggtgtttgcgtcgtccctggctcgggcttcggccagaaggagaacactttccacttccgcacgaccttccttgcccctggcaccgactgggttgagcgcatcgtcaagttccacgccgagttcatggacaagtaccgatgaacatgtactaatgtacaaaaagccatgtaaatttgaaatgcccatccatcgagatcttcgagcgattggctggcaccatatattactctttgttcgtggttcttttcacgtctatacgaaatgggtttttggcatccatacatgtgtggcctctacgacgcaatgttttgaatatttgaatttggatatggatctggaatcggctcgcccccgatacctcatagactactgactccattgggcttgctattttccatactcgtttttgggtactctttctggcgtctgtgcatcgcattttgaatagtggtatacatttcccttgggggacatttgcatcgttcgctctatttgatatgggtactgcatatcgtgggttacgttttacagaaacgtattctgaaaattgattcattgattcataacaagttcttgtatctttcctggtcctgatttctagttggctaagagataactagacgaatgagagaagagtattagaaaaaagaattgtggcaggaagtgtcgaattccattttgttgataatgcaattatcaggttcagcaaatattaccgttcactctccgagtccaaaagagcaaagcaaagcatggtggtcgctccagagtgttacttcgggctgagtctgctgggactcgaggatatccgtgtcactttgagtgtgctcttgtccatccaactcgcccacttgttgagcctcgagtatctcaattttacgtgctttgagaccgagcagcgcgactttgtccatccgatttggcggaaatcgctgcttcccatccgctccccatgtgtaacctggttccccaggacgaagagctgtccaggcatctgtaagaccattggtctccacgaggacggcatcttcatccagaaccgggttgaagtcaccagcaaccagcccacggcctgcactacgcaaaaaagaggaaacaatagcgagttgccggggccggtgggaaggtttgatagccagagaatccagatggacgtttgcaaatcgtacccgggtagtagaagaagcgtctgtaggtgaagggacgaacagatcacaaaatagtgcatctcttccaaagtggctagggaacgccaccctccaaacaggccctagagcaaacctgctcgtctccgagccgtgtcgcgatccaaagcgcgtcttggataccaaggtcattgtcgtgaacgagtttctgcatggggtgttctcgtgcgcgcttgagaaccacgatccgcgaatgcgctcatcgctcaaaatcagtcgcaagccccgctgcgaaacttcttggagaaatatgatgtccactttggattccaggtgagtaatgaatgtgagaatttctgtgacgcgttcttgtgtcccatcggataatgcgtcaatattccaggtcaagagcaccatatcggatgatgtatcctcggcgcgctgtgactctgcatcttcatttgcatccactggatcccactgctgggagttgggatcgaactggtgccaggactggaattttggatctggcacgtcggctgggaggggtgtgtcatttttccaggacattatgcttgacctaacacgtacgtaaatatccatggtgagaatgaggctgactgtctaggtactcccgagggtgccttgaggttcaccttggaaggtgtggtcagtcttatgattagttaatggcgtctaactacgttgtgcctgaaaaggggaaaacaactagtgtatattcgactaagatgtgatggacaagagggagagagagaggaagagggagcggaactatctgatgatctgaacccacatgggtgaccgccttccggtcacccaacattagttaagcattaagcctcaggctgaccaggagtgacgtgtgtctacatggatgttgtaatataaccacatgtatgtatagattaatgatgattttcatgatgttggaatccctaatggcacagtggtctaacctaattaggacagatcaatcttaagtcggcccatgcgcggaggtctcctcgggatgtgatgtattgacgtcgaacatgcggatccgggccaggtggacggcaactggaatacgtcagtcgatattggttactccgcacgcgttccctgactctagtattgacagcaagagcattcttggggtatccgaaatacacgtgacataggactaacacatgctccctccgaactcccatcgttgtttaaacagtccatccattagctggccgttgcaggggtcgtaacacgcgggctatactagaagatacatgaactctcaaacatatacatctttcaggccaagaatatctgaagcttatttctttttgaacggcctaacgtatggttccataatttcgtgagtagctagtgaagtgatgtagcgggttgtacaaggggtatttctagtctacatgtctctctgaatgaggtcataaggaaacgcactacagtcggtcttatctaatgctctgttatgcctggccatctggattgcgccctgtacatgtatcttagtcgaagggccatcaccaaccaggatctatgatttgttagcggtatgttaggtaaaccaagagatgcagtcataattacctcgtcatgtgctaggaataggggtaacgcaagggtcgaatcactaatcggagagtgtatctctgaagatgatatagcctcccttagtgaccgcacacacgcgattttgtactgaagggcaagttgaacaaagtatggcccattatgtggtagatattgtgatagatggcgacatgacacaagaaagagaccattcaaagagctagcattggtagcagcaagttgcacgaagtgtttgtttaggtgctgtgtacagctttccggatggctaatctggctacgttgcgaagttgaacacggtacaacatttgccatgtctgcgctaggttagtcatcataatctgcttcttagaaggtccgtgagaagtagcggacttgcgagatacatcgacttcttctgacgtgataaagccctacttacagtagtctaagagaaaatcttcattcgaatttaggctcctggcaaaacttgcgaagggatctctccggtgagaccccaggaagcccagagggcttgtgatgacggatatcgctatctcggcggccgctgtggagaatggcaggctttcgtcttccgagccactgatagttttgattgcatggtactcaatgactctctgtcgcctcgtcttggcatgtgccgatcgggctgcatgtgagtgaactcgtcgtcgcatttcagccgacgctacctcaggtactccgggtttggatgaatggatgaactggatttcacttcttgtgcgggacattgtggtcgtggttcagcgtctgaacgagagccactatgaattccaccatgagttgatgagatgcaaaagcgtgtaaaccttaaagccatgaccggacgttgcaggacgaacctcggagctgaaccaacgtggaggtatgcgtcatttgtcagcaatgaaggaccttgccaagacttgctccttcccgataaggaatagtgccacgtgcccactctactagcgtgccttattcctacatcgatcatcgctcatagcacaaacaatctcattgatagattgaccttttccttgttagtaaatcacctaccagaacttcttacacttgcctataagtagatatgcaagctttgtaagcactgaatgaccttgccaagacttgctctttccagataaggcatcccccactacttgccgttgcttcgaagccaggaaatgtccgtagcaacagccaaggagaaaaattgcattcgttctaatctcaaacaacttctacggaagcaagcgggtaatgaatagcttagcaatcaatcattcaaggtacttatataaagaagtgaccagccgcatagaggggtgaccatcttcaagagagtctccctattcactgctccgctgcatatccagtattcattatggtctctcctcctatgaaaagttttgtgtcattcaccaagacttggcacaatgatacttacccggccatctcacccacacgcccggagctttcgatggctgggaaaaacgttgtaatcacgggtggaggcacaggaattggaaaggcggccgccatcgccttcgcccaggccggtgccaaatcagtttccattatcgggcgcaggatcgaccgtctctacactgcagggcaggcgatcactgaagctaacccctcgactcaggtcgtcatgcagacaggcgacatcaccgacctcgcttctgtcaatgcagctttgggtgcgattgtgaaaaaggtcggcagcaacattgacatattcgtcagtaacgctggtatgcttccgaaagagggcccggtaattggctacccagaggctgaactccggcgcactttcgagatcaacaccatgggcactttccacgccttgaatgcgtttaccccattggccgcccctggcgcaaagttcttgtacacggcatcttctatcagtcactgggctcctctcccggaagtgccaggagtatggagctacgcggccacgaagggagcggcgctgaagatggtcgactactatgcttccgagcacccggacattcacgtcgcgagcttccatccaggcatcgttggcactgagatcaacccgaacatccccgtagggccagacacgggtgagtacctttgttttccaagccatcaggaagacagatggactgcagagtcatgctaacacaccttgcagtggagttgcctggacactttgttgtgtggcttgcgtcggatgaagctgcatttttgaggaacaagttgacctgggcaaactgggatgtggatgaactcataggtcgggcggaggagatccggacatcattcctgctaagggtctctctgaatggtgtgaacatgtagttgaagttctgttgtctgacgagttcgagagatgtgcaaccaagttcatagccacaaattttgataaaggaggcgatgttgattggttctcatcgacagaaatctgattctagtcctcggagttcaaaaaccaattcttcatgtgtatgggacaaggctttcaataaagctgacaggaacaatcgttagttaaagttaaggtaagggccggcaacaagactggaggatgactaaacagtgctgggcgggtgcagaataagtagtagtggtgttacaggttaagggctgctagacgactagcttatgctcatagtagtaactacaacaattacgatgagctccgatggtaggcaagatatatatacacggacccactacaaccctaaaaggagaataccagacaacgaggtaacagactaagactcatgacagaagtaattgatgacgacctgatgtgcaactaacaataaggcaaacttgtttactttattaaagaatatgcacggtcaggtgttctattgcttggtaaatgcttagcaactaagaccgagcttgaatggtctagtgataaactagtactagtcagctgcatctgatctcaacaaagggattgtcattgaacgcaatagtatacagattatacctcaatctgacatgtaactatgttgtactgtgacacaatacaaagaagcggtaagcattcgaagacaaaaaaacatactccgtacataccgggtaatgtctagcaactcctagctttccctttccgtttcaatgctcaccccttgccgctttttgatcactaagtagaattgagcacgcccctgagcagcctgacttgttcagtgagtattacataatcatataactattccacgaactgctgagaggttaagtaatacccacctcaataaaatgcaacagtataatggggctagtagttgaaacactcctaggagcacagagcctgaattggaaattgattgaccgaatataagtatcctttggcgtggttactgccttggcagaagccagatagccacgatggtcacatcgatgatgtccgtcctttgttgatggagcaaactgtgcatggcagccaaaccatcgtcccactttctgaggctgtctaacagtcggttacaaagccactctggggctatattgaagatgacgaccagaaatgggaacgtctggaaccagacaaatatcatttgaatggctcggatagcctcttggtatctggcaaaaaaagtccggtttgtcgagctgattccaacatctactgtagctataatccgtgataatatcaacagtcagggcgcgaaaggactccccctggtggctgtacaaggaatactggatcatgctgcacatcttatcggccttagcccagatgactttcttaaggctggggatagaccagcgtgagaagaaggggcttagagcggctcgacgggtcttatgaatatcgttatcaatgacattaaggaggataggagtcttgagagccgtgtcaatgggactatagtaaccaggctcctaaagaagcttgctaccaacgctgtaaatcctcccgtagttctctggaaagctaaagtggacctcattgggagggattggataacataagagcataagagcatggatgagatttccttccttacagtattggtgatagggaattgggagactggagagaccccagaggaatggaccggggatcttggctagtggatggaagtactggcaactgagacatggtcagcagacaaagcggccatagagctagtagcctgatactagagcccatagctcctgtaaacgattattgtggtggaatattacaggcccaggcagttgcaggtgggaactttcactctctatcgcttccaaagtctaggccagccatgcattaaaaggctaaatggcttgggctgggctcgcgacttgtccactcgcacttaaatgctgttaacgccgacattgcctgtaataatgccgggcgttgtgtctagaagaccgaagcagtggagagataccggtcatgggagcggattaattcatcgccgaaatgtctccgcggaccaagacccactctagtacccactccacggggcaagacccgctccgcggacgagccaccgatgatcttccgtgccctacctcgacgctttaaatagcagttggtgtgctgggttcattaaaagcacttcgctacaatatactatacacatatttgcccaatccgttgtatccttcaataatgcactcccgagacgcaaaattttcggaaaaagacattccagatttgagtggatatgtcgtgattgttactggaggtgagttctctctatattgtgttgtctgggaggccacacggtgaatactcactgaccttcattcagggaattctgggatcgggtatgaaactgcgcagcagcttgctatcaagaatgcgcgcgtttacattgcgggccgctcccaagagcgagttcaagaggctatccggcagatgtcgcagtcaaatgtaacgaagcagctagatctccgttttcttcagctggacctgcaagacttgaaatctgtcagggcagccgcactacgtttcatgacagaagagtcgcgcctagacattctgatcaacaacgctggcgtaggtggtctcctttcaagaaagccacggaatgtcagttctgacactaactatcaatgccccatcaggtcatgacggttccatacaaacttactgttgatggattcgagacacagtggcaggttaactatctggcgcctcatgtccttacatcaaccctgatgccgcttctcttgaaaactgcatcttcttccggctcttccgaccgtgtgcgcgttgtcaatgtctcgagtgatgcagcatttttcggtccgaagacgttgttgctggacgacgtaaacatgaccgagacgaagggagtgatggaactgtggtatgtgcacacctggatgaatgaacccatgctctgttactaaatcctagaaggcaacggtatgggcactctaagcaagcgagtatccgggatgcgaaagagttgaacgatcgttacggttctcagggtaggttaccatcgacttgaggaacaactcccatgctgaacaatatacaggggttaccgcatactcgcttcatccgggtattgtccgatcgaatcttcaacggcatgatccgaccgtcattggcagcgtcgtgcgaactcttatgaaatttgcagctggtagcaccccgctagaaggggcgttgaattctcttttctgcgccaccagtccgaaggcgccgattatgggacaaggtcagtatttcgttccggtgggtaaattggactcccgagcagcaaattggatcaatgattcgaagaccaacaaaaagctttggcaacaaagtgaggatctgatcaagcgcttggtgtgacagtgggccactagtgcttaggtactcatctgagtttcatttgtcacgggggcatactaggatatagtatttttagtcattaattcaagttgcattactggtacgaacatgctaggttacggcccgtagtttctgccagcatcatcagctcaattccgcctatgaatcaggaaaggtgataaagttgggcgcacaccgcaacttcacttacattgaatcttacggcatggctggccaaatgtctccttgttcgtcaatgactagtgattcactcctcataggttgttccaggattcacgaaagttgagaatctgacgcggtacgagagcgttgaagaaacgtctcccagaggccctaataaatgcggagggtggtaagtgcaactggagcttgtagagcaaaatgggactcttagcaaaggagaatatcaagacgtacccaatcgacattattaggagtagcgagcattgcttctatcccttccagatatgagttttgcggcgagatttctactagaaggagggctgtgagacgtcatgttttgtgacaaagaaatccgactacggattgccgatatagaagactcaacgggatgaaatgggaagaacataccttcctgcaagaacgaaggatcgtacgagaagataggattttgaaggtccccaagcgattgaaagtcctcaagggaactttcctgagattcttgggatgtgcaaactctctgtagcatagctgaaataagatccaggccgaattgggcttcagtggaactcgctttgaattctgcccaaaattgacgggagtttttgagggcttcaatcagctcctccgagcgataattcccaagattacggtcgtatgaactggaaggcgcatagccttcggaaccacgggagccaagttcaagacagacgatcatggatgcaagtaagaagtcatgctgctcaagagaagagataaaccatttgtctcgataaagaagaccaccagggtggacttctttgaaaatgttcatctggtgtgaaaggatggacattgccgcgtcgatgcaagaggatcgcgaataactgaatttggggtcttggtaagcctttgtcatatggtgacgatgcaaaaagcaccgggctttctggaaaagcagttcaatattgtaacgccgaattagtaaatgagaaggcgttgtgacggatgcttcggacgaagtcatgcgaaaacggggtgggatggagctctgcacggcgagcaagcgtttatcaagagccatgatctcctcatatccctcgacccgaccgaggcaaacctcgttgaaaatagttcggaatacggacagaagttgagcttttgcaatcgtgtaagatacaggcgttagctcggtatggggccgcgagggtggcagtcgcatcgtgtctgcatcaaaatcttcgtcgatgaggttgtgtggaagctgagtatcacactgtgattcttgtatcatggaaggcaatccaagctgacatgaagtcaaggcatcaagttgtaaaattatcgcccagacacgacgtcgcatctcaccattgaaggtagaaatctgtgagtagtgctctgggtctcgatgatatcccatccgcatcgccagcctggtagcaatgccacaaagaacccatacgcccaagtgagcatctcgacgtcgaacatactcgttttggatgttgagcagcagcgcttccatagtgtgggctgtaggaatagtagaatatttggatatgatgagacattccgtggaacaccgttgaaaaacatccatggcattgcgcggactgcctaacccgttcggaaggtcatcttgtgatcgtacgtagaagaatacccccatggacatgataccgaaaagaagactcagccacggggcggagaagttgtggggttcaagccagaaacgggcatactgcagatagagttactttcacaggctgacgatactcataccaaaatgaaggtacctcttgtccaaaagtgggcttatgaatgatcactgcattcgcagttcgttagtaacttcaagtttagtggggaagaaattcgtaccagcagacggctcattcgaattgatgtaacgagataccagtctgtcagccacatccctcggggggatttcacatagtactgccgctagatccgagctagggtgtgtcccctcgaggagcattggccccccctcatgttggatttgacctggaaaatccaaaggttctgccgagtggtctcgatcgatatgctctctaatgcttgcaacctagatattgttactacgatgagctcctattgtaaagcctcctaggactttgacttagttctttacttcgttgcaaatcgctgcccagtgaatgccggagacatacaccacctgaccgctgtttgatatcatgtggccgggcttgacctcgatatcattcgactgtgcttggtcagatgcaacttgctcacggctttcaacggcgaaccccaattcctgaatattcgatggatcaacagcatcttgaatcggcgaccctggagcaacgcttgtaccgacaagatgctctaattggcgaatacgcgcagagagatgctggtttccatgtcttgtgtgagcagagttccggcttcgtaatacagtggcataaacgcagtcaacacctctcgtggcacaattaccgcacggctccttccgatcacatttcagtctaaccagaaattggtgagttgacttcattgacgataggccccgcacttacttccgttgccggcaagaagcgcaagagaggaatccacgagcaccttgcatagtttatagatcgagatatttaaccggactgaatcgcagggccactggagccgttgaggttccaaaggaatggagactcgcgtgggataggtcgcgtgagtgtcgtatctcgactaggtctctctaaaaacccacccacccacgcaaacggcccgttgggtcggtcttagtcagcagacccgtttgctggttgataagcgatgagtcggagttcatgtttctgaaccaggcaatcaagtagctaaatgtaggaatagcctcaggagttcattgtgtgttactgtattagatacaagtagactggtcgacagatatgtatgcacgtgatcctaggatatttaacacgtgttgtagttcagaggtatgattgtcattttgggggggaacatgcaatatatataacaatgagccaagttgatcaatcatcttgctcgtccgtatggacacctcgggaattgtttccgatgatgcggcttttaccactacaagacaataatattcagcattaaaaaccataagagccctacattgagtaaattccaagctcttggtggccgagtctgatctcagtagccgttatgtattatatagagtgagaaatactttgatccggctactatacggtctatacctacttatcgctgcggtgggcccggatcaattgaggactcaaggcccccaggccaatccttcggagttccgcgggacaacccagaaaagcagtgcagtcgtcaggcagtaggtacggagtactccgcggatgaacccaactgtacggagtactaccgactacgtcaggacgaatggatcggcctacttatcattatcgtccatggcatttgtttatatatctggactgatgtccgtagggtcaccatacgtacacatttcagctttgccaagcgaatattcactcgagctcgatgtctgaactaagcaccgcgccaactccatacttatcctcgtaacagaaaatagattatatctgagatcttgagctcgagacgctctgaattagaaaaaaagatgaaagcaatatcatgaaccggatggggttctccactccgtcctacgccttttcgtcatgacgtatctccttaataagatgtagtggtccaaacattgagggcagcagcgatactatcaacgaactaactatgtatcatagtataaacgaccttatgggggctaatcccttctgggtatagtctgcagtgggctgagcatcagtcattctacacgtgactgaactgagcatgatcactgatctgagtccgtgctgacatctactcagtgagcctgagcctgagtactcataaaagcggccgcagatcaaataggaaagccctacctggcagggaaaatccggtacgtatagtaacatacacacataccccggctgctccagtagaacctatgacctcagaagtaatccagctctatctctccagatccacaatgccttccctgttgtacatcctcaacccaaggcccacacatatgcaaggcgcataagcaaatccactcacatacacctcacgctatgttgtatgtacatattcggtaaccggctatctgtattaccgggtccaaccgattctactcgcacagcagaggtgcagcatacagtagtcacactgcagaccgcatcctcggacgaatgtcacacttaccttgccccaagccctgacttgcgtcgtcttggctaatgcttagccatggggtagcgccgatagggggtttcccggttccatgttgcacggtatgtacaaagtatattatgcaagtatgtccgtggttgcgttggatagatatatagctaggcggggagtgtacatacaaagcgtggaactgttcgtttctatttagggtagagtagtgtgatgtagtatatatgtatattgtagagaaataatttattgcttattagtgttaaatagttgtgcgatatacatagatgttgttcgactgttttagaatggcggggagagtctcggagtaagggatcgcgttacaactggatcattgggtacttagggcaagagggcaacctctagggcctaaaatactccgtatactccgtatactccgtacgacctgaccaatccacgagtcaatttgccgatgaggcagctgagtgtcactgggcgtagctcaggttttctcaccgctacatccccgctgcctggccgggatcctctttccatcgatcgttactactagtattttttgaagctgaattcacaaagtagtttatttggtattaaactatttacctagttgataggtaattggtgattagtgatatcatcggcttggggaggtatctcagctaccgtcctgtgttgccctatataataaaatatcgggtgcatacatccacaggcgaatcccagggtttgtgatccgcactgtgcatgcattgggtatcgttgtccgggggcgagtgcataaagaagaatcactcgagtcattatacatgtaagaagagaacaaatgagaaagaaattctatacaccagcgaaaagcaagcaaggagcaaaaaaaaagcgcatgtacggaagcaaaagccaaagaatgtacaagcacgtgcatgtctccaaatcgcaaacccctctagattggatggctatcaaggaaggaatctagactggctaatggaacaagacaaatcaggcatttatcatcatctctcatcatagtcatgaagacggtgtggaggtggtggtatattgccgcgagagagcaagccccgggacagaagaaccatagggggaatataatataagcaaggatcatcatcaaccactgtttcttactagacccaggattgttggaagaagttgtcgtccatgggcggggtggaactagcatcaaaaagaccgctagaccagataggaacggagtccggcggcggcggcgagggagcgctggtaatcggggccgacgtcatgggcttgtacgctggtatctgcgacatggtgtagatatcctgcgcagagacaggttttgactccacgctcatgctgacttgcagctggtgctccagcgcagcagtggactcattagtcgacttaagaaagtcatcgatgttgatcgagtccagctcgttggatgccaggagatgcgtctgaggtagaccaatcaacgaggatgcagagctgatgcggagatggtccatgtcagacgtttcgctcacgctgtgcagatcgtgcatgtcattgctagcatgacccaagcctggaagcgtcccaaactcgtcagtttccgaattgtctccggatgatgatggcggtggaagacccgaggagtacgcggtgtaatcgaagctggcatatgaaggagcttgcgtactggtggtgccaggcacgtcggagtatagagggaaacttgaccagtcgaccgagggagcaccgatgccagcagaccctaggggcatatcggaatctggcgaagtgaaggaacattctgggtaagattcttggaatgccatgcaggtgatcggagaattgctgctcgtggtcgggaaggaggcgaaagaggagacgtcaagtggaggaacactggtgacaatctgctccaggggaaatttgtccatggttgcaggggcagatatcgggttcgacagcgcatcatgggatcggtctaatgatggagcgggaggtgctggtgtaacgaagttgtcgaggtacgagtgatcgagaggggcaggtttcaaatcgtcttcggcgcccgaaagatgcgcgctgttgggagaaccatttcgcgacgtgtgttgtgaggtaggaaattcggatagggtgaaaggatccttaataaaggtcgactggcctagcggcaaatgatccaccgagcgacggggtaagtcggttgggtggtggacggaatgcgatcgcgggatcgtataaggcaatccacatttgtgagccatgtcattatgcttgtgggcaggtttatgatgaccgtcgcggaaaatcgtgagcgtcgattcagatttggtagacgtaagaggcggtttccgtggggtttcaattgtaagcgggggtggagggaaggcaagactggtttcaggcacagtatctaggtgttcttttttgagtgcacaaatgcagcgctggccatgacagcagccacagcgaccatgggaaatgccagtatggcagtcttccttcttcttcttttcgccgcaatcacactgggtgtgggttgtccgagacttgcgtaggccgcggcagtgagtacattgagagactgggcggccttttttgttgatgtgggtcaattggcggtctaaaggggggattagcatatatacacaaggttgagatagcgtcagattggcataccactatggtgacagctgctgactcggtgaccccggacgcaagcctcacaagcatacttttcaccatcgatgagcatcgctgcggtgttactgggaggtacacatgcgatgattcgcgagggataccggagaaaataaaagtttggaaataaaagagatcggttgaagagaccgaggtatcaagccgtcaaggcgattggcagcggctccttcgagagggccgggccgagtagaacaaaatgaacaaaagggtataatcgtatagtcgaaggtcccaatgcgcggtgttcacagaacgccggactagcagtgtagaatgccgctgagagccaccgcactgtcttcgattggaacagaaaacaaaaagaaatcgaaaatccaaagggtatctcaggcgcgaggtagagagagggagggggggtggtcagggatcggagagtaagagagagggagagagagggggggaccaagcctacgcaccgtttggcgccggccgttagacaggacaccaagtaccggtagtggcggccaagatgaaaagcgttcgataaaagaagacgttggacacgcaatgaggaagagaaaagaggaagggaagggaggcgggcagcagccgttaataacgggatggtatggaacgaggattttcgctgcgctactggtctttgtggggggccatactgacatgtatagagacgactggtattgtacttttacttggtttttactgcttttactgcttttcctgcgtttatttactggttttgaatgtaatggttgtacatgctgatatagaatgggctaacaggtggtaaattaactgtactattactccatatcacacaacagatgcttcttcggttctttgacctgaatccttctggactccacttacaggaaccatcgctgctaagaggttccaacgcacatcgtgagaatgaatttagtttttcttcttttaatctactagtcttgtttcctgttcctcgttctctattctcgctttttaaactttgcctttttttcacgcccaaactggcagccccaaccgggtgtatagtatgaccgaactcgtagccactacatggaatttcccttacaacatacacaaaaattggcgtctaatcttgacgaactcaccccacttagcaaaatatggacctaaatctggggccgcatacggagtatcccgactcatactctctcatacttacatatgaacattgtgtttgtgctacggtaaccctagttgctggggctgaatctattataggacataatgtttcaggggtgcgcttgagccaggtacatgaggaactttccataatccctgcaagtttccctagtttatcttttcatccatgtccttggcacacacaactagtaatggaaaatgataggaaagagaaaagcatccagtggaaggagtccacgtaggtgtgcatcaaaagttaatatcagattacgtgcgacaaataccgagtacatacaagtaccataccaaaatgcatgtcatagcgcaaaagcgggtcgatggcgtcagtgtccctgcttcgggcggcctgcagagagtttgggccctgatctgcatctttttacccgccaatcgctatcttgcggtggacactgggtttctttacgtggtattccgtatgtacaggttttgttcgtctttatccatctgtacagtacaacatattaaggttgaatcatctgatctaacatatgatgtatggagtcgaatttggttgaattgcattacgttgacctctaatcacccctttacatgattccacgtaaaaaaacggtgctctgacctcaactagcacatacaacatacatagctggttattgcccccgaaaaaaccagatccgggtaataataatagcgaatagcgagaaagtatgagatactcatactctttggtttgacatatctcaaatgaagaaatagcaactccaacttattttatggtaagcataccactattgacatcaggctggaatagcttgatttagaaaatcaactaaatcattcatcactctcaaactagttgtcgggtagatgcgaatctttctgtggccaattccatactaatatctgtctctgtccacaaagaagactcttgaatatatagggatgtagataacaacaacataggaacgtaagacccccactactcccactagttaagggtggacgagtagagtaatcaaggacttgtagcactaggttttcagaacgatgagtttatagtactatgaggaaaatcacctgactgatctcgcgcatcagatcaatatcagtgtgaacgagtccgatgacattcgacggtcttgagagcatgattgatactcactgccccctggaataaagtggcatggcatgggtgctaacatcgttttgtacgtggtagttcatccgaagccgaaggggaaatagtattaatccgttcgacacgcagaaacgaaaggccgtcctccgtgcgatcatcaaaaaagactcggggaagcaaacaactgtatatagcttcaaaataatatctaattcctttgaaacttctgtacaaatgttgttgcttaatgcggcgctctccgcgctagcccccttgaaaatcaccccccacgaaattttagttaaaacttcacttcttgcatctcgcgtcctacactatcttctctccatcccccggaggcccgctttgcccacaacccatcattttacttgaggttttcagtttcatcccacacaatgaactctcgcgagcagtctgatatgcctccggcgccttcttacccgtctcctaacggtgcgcagatggcgcagggtgtgccctcgtattatggcaaccgccaaatgaccaccgacgaactgctgtccgcagaactttcgcgtgatgcgtccggtccaggtctcggcgaaacaaacaacggtgttcatcatggccagtccatggtgttgggttcctcaaacgctgccgacatgggtcgaacctcgtcggaggatcaacaccagcatcagcacatgctccagttccccccaagtcaacaggttggcgtcgaccccaatcacgacttgagctatggcgaacagagtgcgcgcaaacgatcgaagatctcaagggcctgcgacgagtgccggcgaaagaaagtacgataataactcccccaaacgcgactgtgaaacctgaaaagctaagacgcgttttcttttacaggttcgatgcgatgcaagctcagaaaccggccttgaaacatgctccaactgcagacgcctcggcgttgtgtgccagttcagtcgcgtcccgatgaaacgcggccctagtaaagggtaggaacaacaagtgcaccactacaagaatcgccagcgctgacagagacacaggtatatcaaagaacttgccgagcgactccatactctagagaaccagatgcaaccagggatcgtgcagcctgacgtgccctaccagtccatgaacgaggtatcgctaccgagagggtaccaggatttcgcttcgccggtggaatcgacctcgggcaatcgcaagaggacttactcggtcttcgaaggtcttcccagttcctcgtttgcacaaccttctttcaacgctcgcgtatcgcaaaatgccttcgacgcgtccgagacagcggcagacccgtacaacccagccgtcgccaacggtagcgcaccgagacctggtaatctgttctggagccccacgggtcatgagaatgacctcccaagcggccttgagatgacggatttgccaaagcatgaaggtgatgatgatatgacaccggtgactttggatgaaggagctcttgatgcgtacgtgcaatgtgtaatcctcgtaattacgagaaactaacctcataccggattgcagttactatcagaagattcacaccctgctgccaattcttccccacaccaaggagcgaacgttggagcttttgcaccaatgcaatcgcgaggcacaggaaattttctgccatgcgttgtacagcgttactcgcactgacatgtctcgtgtggctggcaatttcgagaagattaatggctttgataatgctcaggatctcctcatgttccacactcgccagccattgattatccatacaacccccgtcaacctaatctggcttcaatctcttttgctgatgatcatcgactgtgacacgcgtgggccggataattttgttctcaaagatggtatacccaagggcagcctagtccaagccgctaacaagctcggatacgatttggccaagagccaaggccagctcaagaacaagcgatctgtagatcccgacgtcgactcggatgccaatctcacccggcgaaactgggtgtctttggtcatcttggcccggtggtatgctatgagtgtggcagatgctaccgttctggggggtcatgagattggcggccgtgaagatgcaagggttgttggtcaaatcacaaccggaattgcgtgtatgttgatcttccttggtttacaattttactgtttcactgacccttttcgctccagcttactcgacattcctctcggagatggtcactttggtcaatgtcgaccacaacgtctgccagactaactccggcctgggtcgtatcatcggcgcgaacctagtctcgtctctggagcgtctagcggagatggaggacatattccagatccacgagctacccgagaactctaccactcgcccactttacgaaagcctccaagcacaactttactggaccgtccgtttgctcatcaagcgtcacgtctttgtatacagcccgtacgagatcatattctgcgcgcaggaggtaatcaacgagatgcacaagtcaaccatgcaatcccgcctcccatccccctttgatcttcacagtctcgcgctcgcttcaatgactcttctcgaggcgaccattctcccagaacacgcaagcgaatgctgggctaccctcgaaaaagttgaagagatcctcgactaccgctccaagcgtgcagcaaagggttccgagttcgacaatatcttcagcaccccggaatgggatgccaagatccgcatcttccttgagtggcgccgtatcaagtcccaggagagccagctccaggaagctgagctcggcggtctcgccaagtcccagcagcctgtgatgggccccaatgagcagcgttctcttcagcaccttgctgatcttgctgtcggcgccgagggctcggttggtcagaacgcgccgtccacgcccccgccaggtatttccaatgagcatggcgaaacggagcagaatatcgctcctcagttggcccagtcgcagagcggatcgggtcgtgttgttgttgacttcactatgctcactaaggagggctacctgaacgtcttctctgggttgatctaccgtcgtacacgttgagttgtttcgcgatcaagccccgtcttctccgcttaatccttgtgtctactttttttgtctgaataaaggaggcccctcagaaatcgtttctcattatgtaatatttgcgttggctgggcttccctatggctcaggcttcgatgatatcttttatatcttatgttgtagtcgtttctcggtcaaaaagaggggatctagctcttgaatggaatatcgtttatatatgatctatatatgtatccaattccaggcgcgaggtggcttacccaaagagtttcgaaatttcgaaattaccggttcgatgcaaactcaacaaacaaggcgactgtcaattctctcctgcatctcgctgccgtttcaccacagactacgacttttaccaggggctgtctaaggctcggctgacgggaaagcctctatagtactgcgtagggttttccttatcccacctttacttacgaccacgctactattcctgttgctttgacctccccgtatagacactacctcaatgagtcaaatagctatgctaatcttgaatagttctttgctagtgtggaagtaccccacatggaggatgaaggctttgacaggccattcggatttatcgtcactggccaatatcttgctattcactatcacggcaacgacttcgagatatgcagagactaccatgcgcgtggtgctttgttctacctttccgacgacggagaaacgataattcacaatcgcacatatgtcggcgctctcactgactatcccgactatgaaggagacgtattttacatccgcaatgggtcgcggtacctagcccaggacgggcagtggacggaccacacccatgacgctatcaaagtccaaattgacccagcgggagactatggcgatgccgaacctcccattcccccgtcaatttcaaatcctgtcgttgatccgggcaatcctatttccgcggacggagtcgatctttaccaccccgataaatggttttcgttatatcccattaccggcgatagtatctggtccggtgatgctggggagctggaaaccaagctatattttggtggaaacccgtacagtgatgggaggtgttttcagctctctgaacatgatgggaagacacggatccgctcctatgagggtaaatatctggtcgttctgatggaacctagtattgccgcgtacctggatgaaggctgcaagggacatactaggttcgatcgatgttctcggtgcaagctccattacactattggatatagttccgagccggacgggggtctttttttagttccgaggggtctgccaagcatgtttgtcctgaatgatggtcttttctactataaagtcgatgttcttaagggtagttattcagaggtaaagcgcgttgaagacatggatgatgcgtcatttttccagtttgtcgcctgaacatcacatacacaatgaagatcgagttgattttctccatatagcatgacatgacaagacaagacatgacatggcatgttatgatatgatataaactaggaaaataagatactaggaacataagatacggtattccagagaacaagcgaatagcagtcatccctcattgcctttgtccgaatgcaaatcgtctccatgttccatctacatcctcgcacagagtcatgaaactgtcatcgtcaatcaactcggacatccagttctcaagaaaggcaatgcgctcagctgttggtgaagaaagataccggacaagatggtcttcggtcatggtgggtgcttcgtcgtttggattgctagccggattatggttgcagttcaagttagtttgcttattctgggtttgcgatgtatcctgaacgctaggtacttgagatatctgttcggcggattcacagaccggagctgtgttttgggaagcagggggctcttcatagagcaataatggctggctcgcctcggggcaagcatttgtttgggacaagagttgggaatccggatcgggcaaattataatgatcattgggttcgacctcaagatgaggtggatgaggttctgggtctttgtttggcctagtgggttgcgaaattggcggcggagctgactggggatgcttctgcgctgctcgagacaagcttgcagcgtgcggctttcttgcagttggctttgagaagggcagatctcgcttaggagggagcatctggtttaactggtcgacgtcatggattgcagatatggtggaaagctgagagcttcgtggctcgggttcctggtttgagatgtgtgcgagagcagatgcatgcagtggttgagatagatctaccggtcccatgctttgggatgggaggttgagagctggcacagggcccaatctggacacagggtgtgaaatagtacttgcgggagaagatgctcgaatgggtgctatcgaagtcaaagtgtgagatcgctgctcgagcgatggtcagaggaatcgttacatacttgtccttccagaccccaacgctcccgtggggtagaagtggactccattgctgctagttgaagttgccgccgtatttgcagtccggggggcaattgaagagagatgccccgacgtccatgatgacactgaagggagtcgttgtattgctgggactggtattttgccttctgtcaatggacagttgatttcgcctagaagagtcaaggccatgaagtagtcacgctctgttgtgaacttgatctgaaaccgacgaatctgcagagttacaggacagtttagttaggaatcaccacccaaattgatatcagaatatacacacatgtgtttcaccgtgaggatacttgattgcaagacaaggcgactttactacgacagcaaagtgtgaccttgggggtggaataagccgggcctgcattcctgccatgcgagtgaagaatacgagatcaagctgctcctaaattcgataacccagatgttcagcattactgactcttgtcaagctttatgtgtaagtgaagtgtaccaggataccatcacctcgaaccactttctgaatcatcctcgatggcacagatccggaatcgagaaacttctcaaagatgcaagcgaggtctccattcccagggacatgattccaggtcaatggaccgacatggtcgatggcagtggttgtatgagagaacttggcaatggctaagcgaaggacctgaggagggatgatgggtggctgtagatgctgcatcctatagactaagagcaattcacaaagagtaaaggccgaggagttatcaatggatataatatagatgaagaatgagcgtggtggctagtgaaatgatgttcatgatgagggcgagattgagagaactctccgtcagcactcccactaattagcattgcccaccccattaccatgtataactagagtgtagctaaaccacttgctgtaagattaatgtatgtctttccttgtatctcattccagaatatttaaattcttgaaagtcatgttgagactcgaaaagatatgactgttgccctaggaacactctatgtaaaatttgtcagcttcgttggttgaatcattccaaaagaaaacatgagcatagaatacaatcaggacatgaagactgatcattgtttctattgtttctattgtgtctgtggacaaaataacaattattgaagaatgtgacagcctgaggccccaatacatacatcgctgagtcatcaataggaacaaccaataatccgataacgcgctctggacaagcgcggacttttggctgatcagtgccgttgatcgcaagcccagctctagccctccagggccgcaaggcattgacgattattttatctttgaaacgtatcgctgactttgatcgccgacgcgcaaatttactactcccttcaaacagccgttgctgctgagcactttgctcttttcaccgtcgcatccagtgttctcaggtttgaacgcgcgaaacctgcgactcaagccgagccacagtcactggccgtcgccatcacctctttcggtcagaatcaacattctatcgcctttgtactcagaccctgaagcagccccacaaagtcgcaagtttgacgcccctgcaatttttcctgctcgactcgtttgcacataaagacgtatcaagggcagcattcctcgagccgtctcttcaaagtctttgatcttgggaccagaggatcttgtctccgattttctctcggattctcgaggtcaagtttgttgatctcatccgttgcaagaaccgaaccaccccctgcgtttgaaaacgtgaacggcgcaacgctgtcgcgttcctttagcagcaccatgtctgcctctacccctcgcacctcgctgcgacgtaagactgccatctctcagcagacaggtgtggtacctatactaacaccacccacagagggcttacgccatgctccaaaaatcaaccaacccttcatccccgatacagcccctgcccgtcgatcacacacccatcatggactcacatcaccacaaccgccgaccagcccccatcatgtaaacatgaatccggccgccaatccccaaagcgcgcagttcgcagtcgatagctgggaaggaaaagacaatcgacaggtgcccatgtcgacgagggaagtcccgaccccagggaaccgaccgctcatgttttcccatgtgcgtgacccttcgaaaatgccccggcaattggattatcaagacccttatttcccgttgagatatctcgaggttccaagaagtcagtatccccatgcatcccatgaatcggctagaaatactgatggccttgtctcgttaagcggatcacatatacaaacgtgcccattatggcctgcagtcaggtattccagacgaagtcgactttgcgctgtaccacctagtacaaatttcaaatcagcggtgggataaattcaaatttgaaggatttcccttgcttgcggaaactttgatgcagaaagcacttgacatcacacaactctgcacgggagtgaagtgggaattccagtatgatccccggaagccgacagaccgtgccaatgtgctcaattcgttacatggtacccgggatattctggataaaattagcaaaatcccagtgaacctcccggacgacagtcttgagacctacgacttcaatcatcggttgagaaacatcaaagaggccacgttagtcttgcgaaacatggtgctcctgaaagagaacgcgttttatgtgtcgcgttatgcaaatggtctattgcgggatttcttgatcatcttgatcaatgctcccaatcaaccgcgactgaatgaaatcaaaaatgatgcactggatatcgcggaagaggtcaccaaattcttgcgaactgaccctgaagatccgctgtggatctctttggtgaattgccttgactctccagaccgcgcacacgttgtgcggtccttgtgggcgttgacacacttcggcactgagctggacgatgcggatgcaaacagggccatggaaaccctgaccagaccgactctccagcagatgtattatcacacgctccttgacctcgacaaggatattctgagtggtgcactggacttttggtatcagtacacgctcagtcatgataatatcgagacattgatggatgttgtcaatttcccaatcgtcttcgttcctcgcatgatcgcgcttttgacctatgaagcacgacccaccaaaaaagaaactgttctccaggaagaaaaagttgcacctccacccactgacattccccgtgtatcccccgagcttttggaaaagctcatggaactgtccgaaccagagcgaagctcccaatggctccgttgctgtttcatcgaggattcagaatgcgagatcacacagatcgctttatggcaagcctaccagagccgatttgcagatccccgtgtcactggagggggtgttcttcccgctgcagagtttatcaaaaacgtcagcaatacattcacaaatgcccaggcccaggtcatcaatggccccggcactgccaccaaattcattatcaagggcatccgacctctagaaactgcgcacacattcgagggcttcccctattcctattgcagatgggctgacaattcaaagccctcaaagatgtgtcagcgtgcgttcacatctccgacagatctccggaaccatgttttcggcgaccacatgaccctggaacccacagacactcccggccagtataagcttgacgccgcagagtctcccatccatacgtgccaatgggaccactgcacacggttccgagcatctgggcccagcgccaacacatccatggtggcgggccatgtttcctcgcatttgcccgaagaccgccccgccgacgcacagcccacaaccgccaagcgtgtggttctccaagagcgaatcgtccgcaaatggtattacatggatacaccgatcaacgaaaagggcgagccatttggcgtggcctacaaggctgcgttggtgctgcgcaacatcgcccggggcctgccgaatcggaccacgtccaaatatggtggacttccctggaagaaggcctgcttcacgagccagcgccccaagatcgtcgaagtctgggaccggaatcgtgcgctgcgcaaggaacttaccgagttaatcatggtgattgagaaggaggtagactattaaatttcctattacatgttttccggtgtcgcaacggcttctttttcgtttatcatgaatcaatatctctgtacgattaataccctgattattcatgttctcactgtctttatggttcccaggtcctctcccttgtctcaatgtacaatatccaagagccaggcccacattggtggtgttttcttttttctgctttgtttttaaaaggcttgtcgctttgatctaagcctaaatccgcgcgcaaaaaggcccccgaaaagcggagctgcattactacctaggtatgggtatgggggtgggatgtctgactttttcggcgtctcttgagatagacattcgagattcgttagttagcaaactgaggatcagggtttaatccacgctttttttcgttttacatccgtttgatttgagtcttttaacctatacgcaaaacaactttcccctcatcccctcgcctcagcagcctcttcctccaaaacccgcatcgcatcctccgccctcgcaacgggtacgtagatatgatcgtggaaataaccgctgacaacattggtactgataccgtggtccttcagccggttagtaatggcagcgatcaagccgacggcttccaggctggagtggatagtaagggagatcttcttgcagggaaagattggctcgttgaagtcatgcgacgtggcgagcgcttctgttgtcacgatcgttgttccctcttcttcttgcacgattagttgcggttggagtgtcgagagaggtagtgagtggaggggtgatttggttgtgaggaagacgtagattgctgggtctaggcttggttgcattgttgccagaagaattgagatatttttttcacctggaggtgccattttggaagttgaagtggaataagtagctctgatgaatgatatatagggatatggagtggatgtcatcttggggcatggtttagctcgaagaaattaaccaatgagagcacaatataggatctacgcgaaattttgatagatgtttgtgataggaaaatatgtaaacttgcctgaatactccttaggtttctaacgttggcgatctgtctcttagctgtactataacaataataagccttagagaatactcggtccccgtactatcatttccctatttacttattacatcagtctctcttgttcaacaatgtagccaagcaatgaggtgggcgataaccgcataacgagtgattcatcgaaatattcttttgaattctggcttatatagagctaacaagctaagactagactatggaatttaacagatgtcaatctacgtaataatactagcaataataatatccgaaaaagaacttcacacttagtagtcacctgtaggcattccacccacagtcggaacatgctgtccatggaatccgaacccaacggccccgtcgacatttgctcgaccaagctccgacaaattacgagcatcgaggcagagcagataactcttgctacgcatcccgtcgagaaccacactaagaagtacgccatcatcctcactagtgccttcggggttagcgacgaaaatgggctcgccaggcgattggccgtggcatgcccagagctgcacttgctgggtatcacaatcgagcttcatgataccatctgtcagagttgcctctccgcggaaggtcacagcgtagacatatcggtgtttctgggtgacaattttcggattcagagttggcagctcaggcgacaacgatttgcaaacagaccactcgactattgctttcttgggctcggtgcatggggcggaaggcaccgcaggcagtcggaaccgagtaaatgatgaacggaaagaatcgtctttcttcttttggaaggccttggctgtatccaatgaagagatcaaattctcataatagagagattgcaaacattcagaactgtcggctctcacgacatctgcaacaatatccaactccgccggattctccttcgagggttcgagccatgcgttgaccgtgtggaagcaaaagaacgcagggctttcgtatgtcgcgatcaatcccttgccatgcttacggtcaatgacatgccacactgccggctgacttgggtctgttggcgagatcgcatctatgaacgaggagtcaaactcccgtggctttatgtgcgagttccacaaacatagcaaaatgtggtcctccgtgatgaggaatgagtgaatataaacaggtgttgcggggaaggttgctaggattgtggtttccccagtcgaagccgagaccccgaaaacacggtatgtacaggttggtcccagcgtgagattataattgaacatgtctcccgtgatagggtcggatcgggcatgagatgcagcgaggtgccccgaaagctcagggtgtaaacttgtctgcgaggccaggccgatgggctccagggtttctggatcgagcttttgaaaggcgttgtagtcggtcttcgcatagagggttcggattgctcgggaatcactccaccgagaagctgacttcgactcatcgggcttgggatcaaggcctggaacattgatcgaaagggtgacagatatgttcttactcgacggagtgggttgcgcgacatattcagtctggactttgcccaagacgctcttgcagggatcgcgtttctgtccgaaactgatcgtgcgcagagatcccgtcttccttgctagttcgatctggtcatcggttgagaagcgagagttgtagaaaacccgaggtgaagtacaggagtcatctggagcaaagatctggaaacgatggttttgaccgaatccatcgaaccagtgggagagacgcagtgtttctccattctcggcttcgacatggctttttcctggacctgtgcggtacagaactccagcagcgtaggcaggaatatgtcctatcacagagagctcgacgggtttgcgctgttcgtattcaggatcgaactaaacagggatgagcatgtataattcgggggttctaactatcacttcacttacacccttgtcattgggccagttattataataatcttctgtcctatcattctccatggctattggatctgggccaatagaaggcatattctccaatgtgacgtgtcttgagattgttgcctgatattttaggccaccaattctgtttcttcccccttgtcgttttgtcgaatctgatttactgaagagattgataagtggacaatctatgcaccctttatatatttctcaaacaatagacttgtctgctgggcctaatctttgtgttcgtcatgggcggggcaatcgcgacgggctaaatctcacaaccgacttctccctttagctcgccaatcgccaacgtcgaattaccgagtctcgctcatcatcgtcgctttgagccgcgccaagtctacaaccgacttcgaatctcggattgcatattcaattctggtttcatccggggatcttggcgggatatacccactcgaaggctgttaatagcccgtcttccgcaaatgatctatcttgtgagatccacatctgaggttgtcaccttttcggagccttctattaaaccgacgccaaccccccatgaagcaacgagtacaaaagccagagaccacaacaggcccaaagatgtggagatgtaaagaatgtccctccaattttcagcgattagaccatatgaaacgccatgcccttactcgtatgtttccaataatactcagatggatacagtaatgacttgccacagatcaaacggcgaagagccacatctgttcattttgcggctctgtattaagccgagggtgtgtcatcttccatcacttccgaagagagatatctcaccctgtcatgtgtgctgacaaaaacacctagagatgtgctacggaggcattggaaatcgtgcaaggcccgtgtggacagtggccatgcaatccccgagccggagcgcggtggaaaacacaaacgtgcctgtgatagttgtgcaagcctcaggaaagcctgtaatggggaaattccgtgtgcggaatgcacccaacgagaaagacaatgtacttatcaacgccttctcggcgacgagcttcccttgccatccatatcgcaggctttattagggaccccggacgccgaaagttcaggtgtgaataatgatgcccctaaggttgctgagtcaagttgggaccttggccctgcaacgctttacccaactcgtacggaaattaatgctcgacttcagaaattcgcttttggctgattagaaaggccaacaatctgttcttgacggctccctcgcctttcgtggcccgcattgaagattttcattctgtttcgttaaagtcattaaaagtaccatttggtgtaactattttttaatagattcatctttaattatagttaatttagaagagttagtatatgaaattgtatggtattaaataccatataggcgtatatagagtatagactcggatatactaaaggtatacacaattccatgaatagaggtaatctcttctttttaaaaagctttaatagctaataagaccctaccctcctactctattgactttatagacaatcgggagcatattggtggcatggtaggtggttgaattgacaaggtactaatttacggacgcgttttggttggggtgcgcagctcggttgcgtgcgcagctcgcttaccgaatacgttattagctttgaaggataggcatctctgtgcaatccaagttccccttcactggctccccgatgtgtagttttcaccgtggcaagaaaatggaatcgacgctatcgtagacattgtcgataaagttctcatagctcaaccaagccgtgtcatcggagctactttgcagagtcgggtcgctgaaatccatcgcatcccacacattgggccagggcaccggcgcaaaggaagtcggcacttctgcaacgtgcgagtctcgtggtccatcgacggcctctctcaaatcaagcgagaagttcgtaagatcctgttgacgttcagattgttccgagaaaagctcgggagaaatgccgtcaaaagagtattcttggcgagaggcatcaataccgagaagctgatttctttgcgttttcgcctgtgacatgagcctctctaaaggtttccagagcatgccctgttgagaatctgcaattacgagccgcgagcggtggtagacatcttcaacgactgtccagtactttgacatcaccgtgggacttttgcagacacagagttcggcaagagccacggccaatgcgtgccacggaacccacatcgactggtaccaccgccaggacctggaacctgggtggttgtatacctcctgcgagcactgcaggttatcagctgcgattttgagaagagcattctcctggattttcgggggtatgaaattatagctgcgttgcagcggccggagacatgctagctgcagccagctacccataagacatgctgtcttctgcgcgtaccactggaagtccgacaggtcgggcctgcagcctcccagaagtactgacgtcttttgttggaaatcgtggacgacttgctgccgcaaactcatgatagttacggctggctctgtgacgtccgaaaatgcaagagttcgagtcacggacgcagccgctgcgctaaccaaggtatgcgtcatgtcggtaaatgtgccttctgtgtgttcggagattggccatgtcatgtcaaaccataggtcctcgtcgttgatgttcaaaggcgggttgtaatcgagccatgctgattgcatcatcggctcggatgccctgtctagggaggctgctacatcgagaaggccgattcccagccatgctcgtttgcgcatctcgtgctcaaaagggcgtacggtgaatggcggctggggcatgtggagagataatgcctgccctactcggagtgccatgctcaacatagtccagacccttcgactttggtcttgagatcgtgcggcgagctagaagggtttagattagaatttcaagatgaaggagcacgaagacgataaaattgtagttgtactgaccagagagataatataagcttgcagaacagtgagatcgttcgtcgtgacaaagtccgcctttgcgagtgcagattcggtttctttttggaattctgcgactattatcttcttgctcgtgttgaacattgactgagattccacttcgtcaagagtacaaacagcgcaaagataaatagccgaagcaagggtggctggtgcctggtgatcctgctcatagtcaagataaggcttgccatccctaataaatgcttggagcgacggccgatgtaggattttgaacagaggatcgacattgcggaagaaaatatcacataacctgtgccggatttggggttgaagatttaatcgactgttggcctggggtgagttcgacgaactgtcggggctttctgagctcagaaccgacacaccaaaaccagacgctgaatctttgatatcgtggttttcattttctagacgatcttccaggacactgcgcaattcctgggtctgtgattgtgacatgagtcaatcacatccccaaatcataagtttaacaaacttacttgctgcatgatatcctcccaaaatggaccccccacatacgcagttgaagggcggggaagatgtggctgggctgcaccgggcaagtagtcgtgatcctggtgagtatcaggaccggtcgtgctggcctccgccaccgattcctgctgtgtggatgaatgcgaaggcacatggacaatggaggaaatatgcgattcatcacctcgttcatttgcaactatctttagaagtttctcgagtctcgctacccgctcggatagttccttgtccgagcctacaatccgctcaggctttcgcgcgcggccgcggggtagacgcgcacgttccacaggaatacacacgaggccaagtcgctggcagcttgtacaaggactcaacttgtcgcatttcactttgcgctggcgacatgcttcgcaggtgaggcggacccgtggtgcggaggaccgtgagtgggttgtcccgacttggcccacgggatcggccattattcaccggaacacaatttgtgtggctggaaatgaggtaaatggacttgagatggattgttcaattttttcaatgtacatccatgcttgtcgaagatccaaggcacttgcatgcgaggttctgcgccacccccgcgaagctatcgatccatattagcttttactggccaaccagggcttgaattggcactttctgtatttgcggatgatctgcgcacctcaaatgcaaaatgcaaaaaaaaagaaaaaagaaaaaagtgatgaatcggcagagttaatcagtaaaacgtcaaaaaggcggtaggctaagcggtgcaatctacaatacgggcaatattatatctgcatgcttgaggctaaccatactaaccaatcatgagtcatgatgataacctacaaggatggaaatgggtgactatgtgcctaagtacctttctatacatatctaaatcaataagaataatagtctttcttggtactgtttcagatgtctttttagctgttttttattaattatacgaagaagttaaggtgacgatagatagggtagaatttagaactagatagaggcaccgcataaacctatgatatatctctaatctctaaacttttatagaaaggtacttggatggtatcatggtcgatatggtgagaatactatagggaaatggtagctagtaggatcagtttgctatcaggtacctctctctcgttcctgctctctctcgttcctgctctctctcttcctccatctctcttcataccatctgctcttcttatcctcacagcacttctgcaatgttcgatccggcatatcctccttctttttactttatgctgaagcttcttatcgttctcttgacttatcagtgatggctgatccagctcctatcctctggccttcgcaccatcccagggccataactcttttgtcgcctcgcaaaaggcgtcgttatcttcgtggatcagaagagtcggagggtgatatgagtctggagcagtacatgcactcctccgagatctagcggtcagtgtcactagtccactacctctaccggtgaaaatggagactatgcctgccctagaacagaggatcagtccactttacccggagattgaagccatcatgagccggcacaatcttaatgtcacctcaaccttccaatgtgggaagatgagcaaaccaaactatcctggaggtgatatccctttgaacttcttctgtatctctacagagactactcagaaaagagagtcgttacccaaggacacggagaagtcctagtgaaggtggtacttgtggggccatggacacgcgcaaattggttcgagctgcgaactcaaatcatatcagttttcgcgatataagctttatttaaaataacactctgatgtcttatttagacgtcttttttactagggtttcaaaaaggtagaaggataatattaccaatgagaataacagtagggagcagccataccgagcttacttcctctataccgtatgataacgtctttccaatgtataatggacatcactagatcacaatcaaaatgatcgcaaagtactccgtattatccttcaatagtcgatgcttttcttcaccgtcgattaattcaaatactccggcaccgtgcgcgccgcccattcccggttgggaatatacgaattagatcggcatccttcagagttttcgatttcaccgagagctagagcctttgcaaaaatatggagtattgtgtcgtgaagttgtaattagggcagtaaatattcaaatgtttgaataatcaagatatatccccgaactccccgagattggagtttcaggttccaggtttgttcagatgcaaaaatgggctgcagaagtgagtgcagatcgcaagaacaataggattgtactgccccacccctaacccctcctgctcctattgaaacgaagaaaccattctgtagggtcttgatgggggggttatttgacgctattgattttatatcataggacacccacgacgatgtagcccggtttatgggggtaagacgatcttggccgtgagtggaccaatcgctactcagagtttttttcaaaaaaagcaattattcccacgctttgggggttccacgcacccacctgcagtgatgcaatcccaagcaggggagagattcctattatgtacatataggccgacaaagcaagcatggatcaagcatttgaatcgacgaatcagagaacgttttgctgaaaacaaagttcatgccatgcggagaccatgtggtcttcagggcatccttcaacctcctacctaccctcgtaggtaacctgtactccgtacgtagaagtatacgccgtatactcttgacaataatctgcaatttacggtgtacggtgtgcagcggacatgacaaatatcccttatagtcacaatgcacgacacaaattcccgctttctactgatcgccacgtgagaatgggcccgctaatccctagtcccttcggacaaccaggctaatgggacgaatatgaatgcatatcttatcaaattaaatacttgtctactattgctccatatctacctcggtggctgaatgtgatcttcaaatccggtggagagggacctcttacatacctcgggctttattttccttttattgcgtacgccatactttacggtctcctatccctcctttgtacatatgtattgagaagcgggccattccctaatcccgggatacttgatctcgagcattgagaaagtgccgttcatatctactataagtcaaccggggaactttgcgatctctctttcagcgcattcaacacccttctgttcatcacaatccgtgcactaaactgggccttcactcatttatatacgcctttatgacacgatgactactctatcgacaccccgtggtcaccaggccctcgccatcagcattgtgtttacgactatagcgacattaattgctgccgtgcgtatacttacacgagcatttctcgtaaagcagatgggagcggacgactatgtcatcctagtctctctggccttctcgtgggttttcttcggcctgatggtcggcgaagtctaccacggcatgggtgagcactatagggatatccccgctgcaaccttcaagactcagatgctcgtaagttccgcagcagaacatccctccaacaaagtgcggttccattgacatggccctcttacagtacttctgggcttcagttcccatatatcaaacaagcctcatcagcacaaagatgtcgatccttctccaatataaacgagtcttctccacaccacacatgcgccgagcgtgttggctcctgatcggctttctaggcttctacggagcctggaccatcatcagcgcctgggccaactgtgttcctctcgcgaagttctgggatccaactgtcccaggcttctgtttggataaaaaagccttgtggttctccaactcggccatccacattcttaccgatactctcattctcatatacccaatgccagtcttgaaatcgctacaattgcccaagaagcagaagttcgctcttattgctgtcttcgcgctaggtggattgtaagtccgcctcaatatgatgagaatcatttaacaatactaacaatcattcttccagcgttttgatcacaagtatactccgcctcaaatctctcctcgttatcgccaactcaagcgatccaacctgtaagtactaacaatcacctgcaaaacccttcccttatccacgagccaaatctaacaatctaccccagacgacaatgtcggcgcagcaacctggtccgcggtcgagtgcaacgtcgcaattatctgcgcctctctcccgggcacgcgcgccttcctctccaagctcctgcctcacatcttctccacccgaagcaacggctaccgcagcaggaccacgcgacatacgcgaaacggaaaccccctcacagcaaacggcaacacgcaagtcctggcctctgtcgtcggtgggcgtggtcacagctcggattatgaccacgatctggaagctctgtcgccgtctggttccttcaatagctacaccaaagagcctgtgaaggaggtttttgcgggaatcaaggtcacgactaatgttacgcaggagagtacctcgcattcgaagattgttattaatgatgatatgggcagtacgaaggaattggtgaagaagcatagcttttgatttataacgatttgggttgggttcattctctatactttctttttttttctttttcttttcctttcttgtctggtggtcttctctcttgttttatatacctatggctcttacgtggcggttctttggcttttacgcgatgatatacccaattacaacactattaccatcgaatatccaagatatcaccacattctcgatgtatgagggactggctagtgattcattgaagccgcggatcaaaaaagatctaactaatcaatttacctcgaagcaaaattttatcgatgttatcagacaggacatggctagaattaaaacaatcattttattaaactatggtcgttccagacctcaagggtacctacacagtcttcaaacatgagctctagggtattatggatgcattgtaagacaagtgtacagatttcgaggcgaacaaaacgagctgatcattcagtatgcatggaacccgcccactgtacattcgaaagccgccaacattttagagaccaagagctcgtaacaaggaagatataaaagggaagaagagaaaaaagaggaaataattctaggaaaggatattgaaaacgattagcaccggtatgtgcaatcatgcttgcaaatacgcagctgtcctcgtgcaaatcctagaaattcaatatagtggtagaccttagatcggttgcaaagaagatatactctactcccaaacgttggaaaagaggtcgtcagatccgccaaatccactagacttgttatttgtgcttgtagaggtagggtgggagaccggggcagcgctggcccagccgccgaagtcctcgtccgcagccacagtgggtgcaggcttagaagcagcagcactgggtgcgccccagccgtggcccacgtcgttcggagtcaaggtatctggtaccttcatcatagatgcaggcgagggtacggcatgatgcgatgaggcatgatcaggtgtgctccacgcgttcccgccccatggatcaaagcttccagacatcatgctggctgctgctgcgttcgcagcgctggtggctggcgctttcaagggggcaggaggctgcattgggggagcagaaatattaaacgcagatctcatttcctgccgaggagaggttgcagtaggcttcgggggtgggaccgttgaggcttttgtagtaggcgaagaaaatccgaacaagtcatttgacagggacgatgatggagggttaggcttaacagttggagaagtaaatccaccgaatccgaaatcttgcccactggagatggaagttgttcgggactgagacttcggggctgacacggttgcggaagtgaagctatcgaagaagtcgcccgtagaacccgagggtgatgtaaccttcggggcagcaggggtcgacttggcgccgccgaaggatgagagattagagaatgccgatggcttctcagccggtttggcgagtggaggagaagtagtggtcgggaagctcagtccactgaaggcgtccgtaagaccgcccatgtgagacgaagcggagggggcaggaggggaggccatgtcgccgaaggagttgccccgctggtgctgcacggttgatgccggctgcggcttcgagtacaatgacaagattgactgtttaaggtctggccgagacattccggctggtgttgctggtgtggatgttgtgctagacgggcgactaccagtagaaggctgggtgctaccgaagaagtcaagacctagcaatgaatcattgggtttgtgaattttggctggtgcgggctgtgcttgtctaggtggcagacgcggagcaggttcggttgtgctagggcgattcggaggagagatatcatcgccgaacaaatcaatcgaggcttgttgacggtgtaccgggggctgactggcagcggcggctctttgcgaagcggaacgttcaatttttgctttctcctgtacaaccgcaagaggctagcaagtcagtggttactgctgacaagatggtttatcatgcaatcactcaccacatcgtcatcgccgtcatctagagttgaggggtccggaatcccaccgtccattacccatcgcttgctttcgtactttgtccggatgaagttttcgattttcctattcacaataattgtcagaaaacaccaccacacaacgagtaccattagaatgcccttacgcatcggagggaacgtggccgggtgccagctttgcttcccagtatctgcatcctattagcccatgcccaacgtggtcggtcaattggttgcgacgaacttgttggctcttccattgccccatctcacaacactctgaagttgttcatcggtccacgaatcgagatccacggatttgactcggctgatatgcgtgcccataccccggtgaatgcccgagcaccgaatgcaaacaaagacacccaggttccaggaagcccatcgcggatctattcggaagacaattcagtatatgagcgccaagaaatatcctcggatatgaagccagcgtagggcgcaatttcaggaggggatcggaaaccactcacgcttgttccgtttacagtcggcacatatcttgttgtgctcgagtttcagcaaagtcttgattgcctgcgtgttttgggcggcttggcctggggtaggacgtcgagacgacataatagtaacaactcaagaatcgatggtgaaaaagggatagggaaacaatgagagccacctaattattcttaggtggcggtcggcacggttgcggcctaaggctatcggggtgtatacggatgagggaaaatgccagtcacgcagtttggtataaggtaacatgaggtcattggccgataagagtagatatttggaaagataaagtacattgtatattgtattatatttgattttcactgaattaagctctacaaagatggttggtccactcaaatgacgcctctcccccgtatcatgcatgccggctattctgcagccttagtccccgcaaaccgaatgatgattaaaagtcatgaaaatcccttagaccttcgcctgagggtccttagctgcaccggcatcttctgtaaatcgcagactaacactattcacacaatgacgctcgtccgtgggagtcggatacccctcaccctcgaatacatggccaaggtgacccccacagttgctacacacgatctctgtccgcttcatgccgaatgtgctatcaacatgcctagtcacagcaccagggatggaatcaaagtatgctggccaaccacagccagatttgaacttgtggtcggcagtgtaaagcggcgcattgcaaccagcgcaattgtagacgcctttggacggatagtgggaatcgtattcaccagtaccagcacgctcggtacccttttcacggagaatacgaaattgttctgtagccattctcgtaagcaaatatcaaccgtatattgcgtaggagttgaaactccatggtgtgcaaacctgggttcaaaacagctctccactcggcttcgctcctctggtcgggtggcgacatggcttcggttgctttctcggggctggggttggagctgaagaaggcaccgaagaatggaatggtcggtgcagccctaagaatcctggtgctcgtcttcgaatgaggaggcttgcgcgttgaggacaaaaatcgggagaagcaaaatggtggtgcaggtcgggtggggatagtctgtcgtttgaggggcgaaataagactacgagataggtgagatcgcatagagacgagttgatggggaaatgagaagaatttctagtgaccggcaattgatgcagagatgagagtggggtgaagctaatcctatatggcctaactagttgggtgaactgggtgcatttacgtcatcatgcggggagacggttcggggactccttgaggcctagactgatatcgctgtacaagatttatagggcgaatagatttttatatagctcgtaggctacgctgttctaaacccgatgatttctttctgaaaaaaaaaaaaatgtttgattaaacagccccaggtcccacctgggaaaactccggcagtgcaggggtatcttaacaacaaaatctgacatatgaacaatattgaagaaaatggagaagaaaacaagtcaaagaaaagtcaacggcgattcacgccggtcaccaacatggagccccggttgagctccacacgccacccctccttcagcagcatgttccacacggcgggtccaatatgtgacttgcggtcgagggagtggtgaccaacaccgcacacaatgttgaacccgccgtgggagctctggcctccgccacgaacgtacttctgatctcctagtccgtcccaccacgcctggactctctcgcgagcaatcctgaccgcgttgacgaccgtcacaccatgcagatctaggtcatattgcgacgactggcgggccaccagccggtcagaagctgttgccaaatgacgcatggcaagctgacgttgctcgtttccaacgtcccggtaataggcggaagcgccgccgtacagcgggtttgagcgtgcgcggcgggcggcttgggatgcttgggcgagggcaactgatcgggctgcgaagtgagagttggcagcggcggcagcttcatcaaactccatgaaatccgaagcagaatctgcctgctgggctggcgccacgttttcctcctcgtcgagtgcgattggcgacgaaacgaaactgatgatatttgaaatgcaagtgagatcagggcgacgggccaacttttcagccagttcatctgcggctgagatctgattgcttgatatccgaaccaagcctgttagagtggtggcattgatgccggggtacttgtgactgagctcccccacttgtgtaatgagtacaggatcgtcttcaatctcctggatgtccttgggcccatggatctgtgccaagactctgatcgtcgcaccgagtgacatggagttttcatgataagtcgatgcgattttctccctttgcaaagcgctggcccgcgaggaaagaaactcgatatccttctttcctgcctcccatttattggcagaggtgttgttcatggcctgggatgccagttcgattcgacgttgttgttgctgctttttcttctttcgagatttcttactgccgttctggttctcgttggcctggaagccatcgattgacttgggagtggagaattgaccgccttgagcagcctctttgggggtttcttgaggaacttctctggcaatttgtgtctcttcgatgaaagcaagattgagcaaaacatccatcgaacgactgaggttgtcatgacaatcttctaggatgcgctcggcttccagacgagtaatacttgggaacatgctaatcaagttttgtgccttgtcagcagttgacatgcccagaaaggtgtatgcaagcttagagcctttgagcttttcggcatggcgactagcactattggagtcaccattgtcctggtcaagactttcgagcgatggccagcttgtgaaatccgatggtgcgtcgtcagacgattcgccgcccaaagagcctgaaacgtcagagttccggaggttcgttgtgcctgtggggtcaaatggcaagtctgcttgctcaacagcagatgcgttcagcaagtttagggtttcgcgcaactgttcgacctgagtggggatcgccaggtcaaagtccgatacgatcgcaacaaacaatgcaggatcaattggtggacagtaggtgctttcaagctcctaataaagaaatgggcattagagcagagcgtgacaagtgactagtacatcacgctatgcctacactgtgcgtgaatcggtgggacgcgacgtaccttgaagagctcatcgccacagtcccccatggctgtgatcatggacttagttgcagtggtattggatgtaatattgtcattccctatgaaggactgcgaggttggataattgtaaaaggcgttaggggagtgatgaaggtgaaaagtggcttttttccgtgatcttaatagctttgcgataagatacctagagatagagatcgatgcggcccggaagtaatgaagatgggggaacgaatcacagagccatacgacaagtcacgttctagtatcacgtgggtggggtaagaaatggcacgtgtatatagatcacgtgctcgggcgagagttttgaatggcgtggctaagcctcaaaacagaactgagcggagggttgcttttcatacaatctagaaactgctacctaacaacatgtacttgttccatcctatccgccgaaatctatacttgtgcatatattgtaatatctacctctgtaagctctacgaatgtttcttaaccatgtaaagtacacactccattgtcatggagtctgctgttcatccatccctataattaccaaaatgctggcgatatgtattctttttcgtctagaatgatttgatatcactcaccggtcgatccctggatatgtatgaagagagtcgttctattctgtatgtaggaattggggttttcaaccttcaatatgacgttccttcccaatatcctaagctttaaggaatatgaatccaagtcagagtaatattgatagtatatctacgtaggcacaaggacgaactaagattatgtttggaacaggctgtgattcattcatgtggggatgttaagcgttggaaaagaaaaaaaaaattaatgaaatacagacaaggtataatcgtgtagtgtaccaaagagggagagaaaaaggaaaaccccagacgctatgcgaagagataaatcagggcttgtgcccgaacaccaggcccacacattgggccagatatacatactgcactccttagtgccagatgaccaccgagccaaaaaaaaagacgcaggaatcaaacaaagaggaaaccctccgccaaagccgcatttcaccttccctgttgctagatgccgatgagtgcataacgatacgagcccccttgagaattggtacacggggaattatgaagaacatttggaaggatatgggtaatgcatgaaaatgggagaacgcggcttgagtgtacatctcctaggaacatcctgaaccgacaaaaagcatgggtatttccgtgagctgctagaaacgagaaagcagaagtgaaatagaaagaaaacgagtgaggatgccagccccagatcaccacatatcatcgtcatcgtcgtcatcgagttggacgtcgtcgccaaaggacgtgtttccgtattggtgacctgggccataagcttggccattttcatagccctgcttgtcgctcctcgaatggctaccgtagcgatcatgcgaatcgtcatcatagtcgtacatggaagagtcgtcataggcactttctccgtagtgttgttggtcctgagactgtgcgaggctgttagcaatcttgctttcccctaggacaaggggcatcttcgcctacctcttggtatcgctgatattgcgcatactcatctggctgatcccttgattttgatgatctctgggatgatccagatgaaacaactggcatctgcgggtgcatctgctgtaccttggccaggtatgagtacatgaagttgctcagcaacacttgagagtacagagctcgccggggattcgcaagcttgatatgcgccatccggtaaatagctcgctcctccaaaattgagaagcgagaccacggataatcgacgtcggcgcgaagtactcgcatcggaggatcaggagaaatgtttcgtgacgaatgttttcggtggtggccttcattactgtgtttctttcgcccaccgccgaaaatagaagagaaaataccatccttttctttctttgattctcccgataccctcctcacgttgtctttgcgtcgatcttcatcaaccttcggatcaaggcggtccaagacaacactttcccgtccccgcggagtgctctcgatagatgattgtaaaacatctagacgtgtgttatcatgcgttttgtcgacagtctttgatttagtctttttcgagtcggcgtccttgtcttttttcttgtctttttcttcgctgcccaacaaccagtgccagctagacttgcggctaccatcagattccttcttgtcttttgatttcttgctctcggatttgcgttcttcaggtttgcgttcttcaggcttgcgttcatcgggtttgcgttcttctgagatggtgggtatgaatgaaagactgtcagtgcgggtactgttgccaggtatcatctgagggttattggcgatgtcattgagtgaagatgcgggttcgtggggtggtaggcgagggttcttgggacgtttcggtatcgggtcctgcgaagatgtggatttcgatggcgatggggttgtagatgccgtggcatgatccgatgactgcctactttgtgaaggcggacttggtatgcggtcgggttcagtggcgggaggtgtttcaattattgcagggatcttctgctcgcctggagctatgttcaaggtagatcggccattcgagctgatacgagaatgccatttccgtgtattggtcggatctcccgaatcggatcgatccagatcagcatccggatgcccaccagaggtcgacaaggcttcctgctcggcctcaggctgatcgacaatcgaatcgaattgagaactcgtggttgagcttggtgcataagctgagccatgcgatgaggcagaggtagctcgagccgctcgcgtcgttttgggattagaaccagtggagacaccggtgagctccagacttgcgggatcttgaggtgagcgaacacctgcagatctggtatcactccccgcagattcagataccccccgtccgactcgtttagaatagggcaacttttcgccctttttcaaactgcctttcttatattgtgtccgagtcgaccggcgtaggctgtttcccggaggtgcgggaggcaggatcggcctgtcctcgtttcctgcaatggcaatattccgcatgccgcgcaagagtgattctttggccaccacttgcgaatcatccaccaagctttccaactgctgcaagttgggactcaacatcccaccttgcttatttgattgggagcgttgatgttccaaccgatctgcaccatctgtataacccgccgaattgtcgatttgtctcgataacatagagcgtttgcgattaagaccacctcccgacccttgacgttcggcccctaaggtcgaagaatcgccggatctgcgctttatgaggtcggccttgctgtcgagaaacgacttgaattctttcggcgccagttctggatgcagtcgcgcaggaacccaaaataaccgagaggcgtcatcttcgtcggcggagggcgagggcggtggtgcgaagcctgggaggtcagggtcaccggcggcagccacatccattgacatgcgccgaatcgcggcgagattgttgagttcctgagcgacggccgcagggttggattcgtagtcgatatcgttgagaggaaaagaggacgttgcagtgtccgagggcaaacgagtaccatcggcattccccggatcactttctcggtcataagatcgatttgtgacaagcggtggccgttggtttccatttgtctgtgtcggttgcccatctgacgtggattgatgcagtggcgaggacggggaaagaggagactcagaccctgcggcggcgcgcgggatggttgttattgactcgccgaggggggttgttatataactcaggcgcctcggatcattacgatcgtagtcgtcgtcgtacatatgtccgatagcttccgtcacatgatggcttggatcgctaatcgatagatgggtggcatggcctctccgcgtcgcatgcccgccagcctcgtggggacttgtggaagcctaaacaggtgcaaatatcattagaatcaagaatgcgccagtttagagtcaagatccaattctcagagtccatgggaaggggtccaattccacaagaatgtgattgtagttgtgcttgaggggttcgaggttgaggggggtatcaacaaaaaagtcacgcccacatgaactaaataccaaggaccgagaaagcgacgcacctgcatggaaagccagtggtacaggaaccaaaagacgccaaagacggagcccgaagggcggaagcttaagaggagggggcagtgtcaaccacgttggatagcgaggaggaacgggtcatcgaagcggggaaagaggaatggagacaaagaaccggtagcagcgtcctcgacatgcggatattatcgagtccgaatgagcgtcatgagtggagaagatctgggagaagaaaggaaagaagagaagaatggaggatgggagttgagcgggcggagagcagatgagagagtaacctccgcggcacctgactatcttgaactctttccaaatgcaaattctattatatcaaaagttacagctattttcctactcttctgaatttagatcgtttaggggtcttttacggagtaggtatcaattcattgagcactgttggctccacctacattaaaacgggggtagatggacgatcggttgatctacatcgtacacgttcccttttcttgctttcttccctttctctctcgactccatactatttgattcagtgatacattctttggttcagattctaacatcggatcccaaagaaagtaggtactacctttcagagctgatttgcaatatacttcttcgatccgtgacacagcatgtacctcgagggctgaaaatctcacctctctcgtgccgattatattcatctttgactgagattgaaaagcctagattgacacgggaaaggttgaaagcatttgagaaaagcacatcggccactgcaaagccgtttggtatctctttatctgtaatataaactagacggggtcatctctgagattcgataggatgccgtgtgacttgattcaattccccgtagaccgaggacagtagctggatatgccatgcaaatgttcgcacaagccaggccagaacacaaagcaatcccgaccagtaagaaacttgagtacatatgattatggtattggaatcaacctatcaaacgcaaaatgtcaggtccattcaaacagagctgaacggtattttcaacataagagactaggaagagaccaatgagacatagatggaataaactctgaagaaactctgcagaaactcttggggaaatcacaatcagatgggaaatgctctgcataaaaccgaaaagatccacgatgaccgtatccccaagtcccaaaccgaaagagaaaaaaaaaggtatgagaacgggaaactccgcgctgaagaatgtaaacggcaccaacaactttaacttagaatgagagaaagaaaggagaagacaagaggttgacgaatccgtatacgccaggatatatgtagggcaagagttggtgggacgtatgttcatcaagtcccgggaaaatgtgcatcaagagttcatcacagtgtgtgctacatggaccgcatcaatttaagcctcaacataattgctgcgaatgaattagccattaattctagaaagtgaaaggaaaaagttcttaccttgggaagatgcccacgcgatcaccaatgcgaccagtccaccagtcttccgccttctccgtccgcttgattatggtaataatttcacccttcttgaatccaaggtcaccctcctgatccgcatcgaatgtgaaaagggcaacggcttggtctgaccgcaattgggctgcaccagtcctttgctggaagatcggtttaggagcagttggacgggaaggtctgcgatccgaataggtatattcctcttcagatggcgcggtgttgctccggttgcgcccatagccatcaaatgaattgtcagcagcggcccgagctgtcacggaacgagaaagccccgaggcaggccgatcatagacatcatcagcccaggtattcgcgcgacgcggcctatcactgtagctgtaatcattttcactggtgttggaccgaccacgctgggtaccttgaccgtaggcatcgcccctgcgtccctcccagaccacgtcgtcatggctgtcgtcatagacaggaatgtcattgtacatggaatcaccgtaggcccgcgcatttccttggaatgcacgggagttcagcacgcgcatcagagcatcggcggccggtgggggacgaatgctgcctgtgagaagttggctagcggagacacgactgcggtacaatttctcgttcgcatccttgcgttccaccagcatactaccttccagactgacaccagcgaaaagacctttggtttttgagtaggagaagacggccgcaacacccttcgtactggctgcgccagccgcctcggcatttcggccaatcggtccagcagcgagtgatacattgccacccagcgtcagcgttcccacttgcgagaatgtgcgaacagcagcggcatcgttgagaatgaaaacaaagtcggtcaactcaaacccgatctgtcctccaattccggcacctgcagtcgcaatagccgatggagccgaccaggagccatcgccaagacgagcgacaacgataccggagccgaatcgaccagagcctaggaaaccggccttcaaaaccgtgagaatagcgagaccctacggggaaagatttgttagtcacggatgttcccaaccggggcattatgaatgtcttacctttgcattggccaaaatctccggtggaatgactttgtcgggaccgaatgcttgcctaggatcaacgaacgatgtcaagatctttgcagcctttttgcactcgcctggtgagagagaatccactgtcagccggatatgccgcgcacgactgcggggaagtgggctttgagtatcgatgaaacctactggtcatagacgccggcagcggattatggatgccgaaacccattttggctggtgactatcgaggtagaatcgaaaatacgacttgggagggaggaatgggggggaatgctattgatgtctcgagggcaacggttagtcagtgtgggcctgcccagctgatgacggctaacgcaggacgctggttcgtgggaagccaacgtaccagaacgccgagactggatcagatacatatgttgtatgcactaggtattatacaatgttggagatgctttgtgaattggagagcaaacaccacatgatatcccacgggcaattatgggctgaaacgagcatcgtttgtggcaaattggggttttattcacaatgtatcaggaagaaaagaagaacgacccagagatattttagccaaagcgacagtttcccgatgggtagagaaacatgtaactatagccgctgtataactcttgtataaatcgtaagcatacttgcggatgcccaggcgccaaggccattatcgtatcgcgattgtcccgaggccgaccttggaacttatccatctccatacacttcttcaattaagcataaggtcatggttggattatgataaatacgtgactcgctagacgcgaaaatggcatcaggtatgttggatatcccacacctagaaacactgctgacaggccaactcacccagttcgcatttgcgtttgcggcgatgagggcactggcaagtccagccttatcacttcgctcgtcaaaggcgtgtttgttacaaacaaaattcaaccggtcctcccccaaatcaccatccctcctaccctcgggacccccgaaaatgttacgaccacgaccgtcgtcgacacctcggcccttccccaggaacggaacaatctcgcgcgagaaatacggaaatgtaacgtgattcttctggtatattccgaccactatagctatgagcgagtcgctctgttctggttgccctatttccggtcgttgggtgtcaatgtcccggttgtcctgtgtgccaacaaggccgacctggcgactggtcatagtgaaacgcgagtggttgaggaggagatgcttcctttgatggcagagtttaaggaaatcgactcatgtatacgtacgagtgcccgggagcatcgtaatgtcaacgaagcgttcttcgtttgccaaaaggctgtcacgcacccgatcgcgccgctgttcgattcgaaggaggcggctctgaagcccgctgcagtagcagctctacaaaggatattctatctctccgacaaagatcgcgatggatatctatcagacaaggagctccaggattttcaaacccgctgctttaacaaaccattgaacgaagcggatctcaatcatatcaaggacaccattcagaaagcctatcctgactcagttacggagtccggcattgactgccaagggtttattcatctgaacaaattgtactcggagaaagggcgacatgaaacagtttggatcatcttgcgagcgttccagtacacggacaatctctccttgcaggagaaattcttgcatccaaagttcgaagtaccgccgttcgcctctgccgaactctcgcccgaaggatatcgattctttgtgaacctctttcttttatccgataaggacaatgacgggggcttgaatgaggctgaacttgcatccttgtttgcccccaccccgggcttgcccgcatcatgggccgacggttcgttcccatcctctacagtccgcaatgaagcaggacatgtaacactgcaaggctggcttgctcagtggagcatgactactttcctgtctcctaaaactaccctcgaatacttggcatacctgggctttgagccctccgaccaaagtgatcagtctattactgcagcgttgaaggtcacacggccacgaagaaaacgtcgccgccccggccgtgttggacgaaacgttgtccaatgccacgttctgggagcccctggatccggaaaatcggccttgctcgatgcacttctttcccgtggattcagcacgacctaccaccctaccatccagccacgtaccgcagtgaatacagtggagcttccgggcgggaaacagtgctacctgattttggatgaactaggtgagctcgagcctgctttgctggagaaccagaccaaactgctggaccagtgtgacgtgattgcgtacacgtatgattcctcggacccggactcattttcgtacattcctgcattgttggcgaaatatccccatctggaagagctcccgagtgtgttcattgcgctcaaggccgatctggatcggaccacccagcgagccgagcaccaacctcatgaatacacagctatgctaaacatgcctagtccaccgctccatgtgagtgttacgtggaattctatccaggaggtgtttgtccatattgccgaggctgccatggagcctagcaccgctttcccgcgtagtgaagaggatgtggagggcaaatggatgtcttggggaatcgccctcggggcggtggtttgtgccggtgccgccgcggtgatgatctggcgccgagttggtagcggaaattagggtcttcgttcatattctataccccatagttcaatgtgcaaataaatgtataaggatctcaagagttagttagttaactagttatgtacctcaattgactataatacttagtcaggcacatggccggctcagccggagttaagccggtccccgccaggcacgcggtctcttctccgctcgaacgtttaccccagacatcatttcccttgctgatcctcccctctcgcgcctcaacttgtatttttgaaatctccaaacctccgaacatcgagcctaatctcagtatacacatctgatcgagtgcatatatacatttgtgattgtcggacctattgcgcacccatatcgcgcccccccccccccccccccccccnnnnnnnnnnnnnnnnnnnnnnnnnnnnnnnnnnnnnnnnnnnnnnnnnnnnnnnnnnnnnnnnnnnnnnnnnnnnnnnnnnnnnnnnnnnnnnnnnnnnnnnnnnnnnnnnnnnnnnnnnnnnnnnnnnnnnnnnnnnnnnnnnnnnnnnnnnnnnnnnnnnnnnnnnnnnnnnnnnnnnnnnnnnnnnnnnnnnnnnnnnnnnnnnnnnnnnnnnnnnnnnnnnnnnnnnnnnnnnnnnnnnnnnnnnnnnnnnnnnnnnnnnnnnnnnnnnnnnnnnnnnnnnnnnnnnnnnnnnnnnnnnnnnnnnnnnnnnnnnnnnnnnnnnnnnnnnnnnnnnnnnnnnnnnnnnnnnnnnnnnnnnnnnnnnnnggcgccccccccccccctgccatattctgaaacctgtccatcgcttcccaacacataagagcttgcagatataagatcaaaagaggaaagtctgaataaagtacatcgcagacctggcatcttttttgcacttgccttatcgggtccaaggttgctctgtttgtcacaccagatctcagcccgagttcaaattgcgcctgtaccctgtacgagtgacgactaatcatgttgtaagcacgcttgttctttcctttcctacttctcccaatctgctactttcactctacaagctcagccctgtgcccttactattatcaacgtaattcgagagaattgcatatctcttgaggcaccagataaccacaacacttgctgacaccagcaacagcgtgcttccccctcctcctccacgctataccatccctgtcgcctatgcggcgggggcggcaaatggtatggcggtccctgttctggaaatgaataatactattacccacccggagcgtggctgtccactgcaagttggcgagggtatgtgcgctccacgatcgctggtgtttcctaaatgtcctgcttccttcagaatatcagagatgtcttacattttatattgcgacaggaacctacacccttcaggatgatttactcctcgcaacaccgcctccccacccgtctgaagctcctatcatcaacccaaaccctcttgcaactctacccacaccccctaccactggcgtaaagctatctcttgttaccctcgaccctcgaaagaagcctccgactttcttgaagtcaggtatcacagttccccaatttggagatgaaaacccggcgcttgcggcgccaccggtggcagcgaaagacgcagcgaagcgaaggaagcccaagaacaacatcatcaagagcagttcttccttcgtttcgcgagtcattacacacgagacatctgccaagcgattgagcgaccgtgacccgaacggtgtgtttgcctttgcgaatatcaaccgagcattccaatggctcgacctcagttcgcctacgaaagaggagcatctcaccaaagttctcttcacgaaggcgcatatgctctgtcacgacatcaacgaactcacgaagacgtcatcacatttggacattgtgatgggatcctcggcgggcgacatcatttggtatgagcccatgtcgcagaagtacgctcggatcaacaagaatggtgtggtcaataactcacccgtcacccacataaaatggcttcctgggtctgagaacctgttcttagcgtcgcacgctaacggtgtgctggttgtgtacgacaaagagaaggaggatgcccttttcactcccgaggtgaacgaccattccgaacaagaaattggacgattgccattggacatccttaaatctgtgaactccaagaaccagaagaccaatccggtctccttttggaaaatggcaaaccagaaagtttcaagcttctccttttcccctgatcaaaggcatctggccgtggttctcgaagatgggtcgctacgactgatggatttcttgaaagaggagtatgtttgtcctatgttaagaggaccgaacgattactaaataacgcttctagggtactggatatattccgcagctactatggcggcctgatctgtgtctgctggtcgccggatggcaaatacatcgtaaccggaggccaggatgatttactgacgatttggtccttccccgagcgcaaggttgttgctagatgccaaggacacaactcctgggtttcgtgggttgcattcgacccttggcgttgtgaccagaagacataccggttcggcagcgtcggtgacgactgccgcctcctcttgtgggacttcagcgttggaatgctccaccgtccccgggtacaccatgcctcaagtagaaatcgatccagcattgtagtgccaaattctcaaattgctaatcgccaccgtgcagacagcggcgacaaccgtgtgcgttcggactcaaatgaaaccgacaagttcaatgaagatctcgatcagacgacgagtcatcccgtggaacccaagtctcgcacagcgcttttgcccccgattatggtaagcatttattgacagccaaattgcctgcttcagaagactaactgatccgtagtccaaaatcgtcggcgaagatcctatctgctggcttggcttccagaaagactgcatcatgacttcgtctcttgaaggtgtgtataatgaggttggttggggctaattaatactgacattttgacacaggccatattcgcacttgggatcgacccagcgacagcgtcatcaaatcatgatgctccatttgggatttacagtcttggaagccttgggggttaccaatcgagatttcagtcttttagcgtcgcgttttctactcctaacacatgatatttttttatgtcgatattaccttaccaatctaaatctgtacatactgattgtgtgtaagggctgttctatatgtcatcctagaaaccaagcgacggcacacttaactcgaggttctcgggtttcacctcggttttcactactaacaccgtgagctacccatctatttttctttcctatctggcaacagaattaatgagaatagagtaatggttaactcaaagatttgactgatagtataactccaaaattatgaaacaggcatagcatcatcgcatttctcattaatggaagggacataatcatccataggtccatagaccaaatcatcaacatcaacatcaacatcatcaagcaaaataaatgtttcctagtcaactagcccaaatttcacaatagtagactttatccaaaaagactaccccaaataccccagaactatctccaactcatatatataagttcccggatacccagctggccagtttggatgaaggatgaccgacatcggtgatttaaaggaccagcgcaaacagacccagaagcagactgccagaagggggcatgaggacggcagcagcgttcgaggtggtacttgccgactccgtagcagtcgatgttgtggtcgaagtagtcttgtgagtggtggtcgaagtagtgctcgaatgggttgcggtggacagactactcgaggtgatggttgaagatgaggtccattctatggataagtcagtccctgtttctttcatgtagtgggtaaaaacaaaatgctgtctcggaagctacgctttccgcctttactaaccaggggtagtggatgtgtgggtagaaagatatgtggtagatgagatagtgcttgatgtgatgaaagtcgaggtaggaagatgtgtggatgtagtaggtgggatagacgacgtggtaatggaaatagaagtagtcggggtagtaaaggtagatataatggaggatggagttggtgtaatagaagaagaagttgcaattgtagaaatagaagtaactgaggaaggagtgagggtggtaagcatcaaagtagtagtcaaggtctcggtgtaagaagttgtaactgtcaaagtagagggtgttgaggggaaataagagggcccttcaggggtggaagtataggttgaagtaatagaagaataaacgaaagaggtagacgcacttgcagaagagctagttataaaagaagatgttgtaggggtagaaatagaagatgaagcagtagagtaataggacgaggtagggctagacgcactgatggaggtgtgagtagcagtcgaagacaggtaagaggaagtagtcgaggaagaaagagtcgaagaagtaagatcactggtccacgcggtggaagaaatcaaggacgaggcagacgaagtttcaagcgcagtactggtttccttaccagagctactagcactactagcgatttcaccaggctcagtgactaggaattgctgagactgagccagaatgccgctagtcggagagaggaagttgatctgatatcccttcctaaattgctcatcagtcagtaattcaaatagaatgcaatgaaattgaacttacccatcatctacatccgcgaacgtttttgctttgacagtgtaggagcccttggaagagtctacatcatctgccacaattgtcgttgtcggagggtagacattctgattgaccagttcgatggtaaaggtttgcggatccgttctattaatattgtatttctggttagcaaattgccagtgttcataaagcactgggataactagcagcttacgagacggactgccacttgatagtaagaggcaggtcggggtcaatcttctcaccaatccggggggaagtgacagtgagacctgattcaacggttactatattgattgtattcccgcggacgatatttcatacctgcagctgtagcagccagaaccgccaggcagataatattcatccgcatattgattggcttcaataatatccaatatggggtgaagtattccaaggaaatagttgtcaatcttggaaggtcgggccgaaatataatattcgtgaggttggaggaagtcaaagccagtggcgatataagacgggaacatggtactttatagccccaatgacaatgacggtggtagggggctgtatctctcacggggtcttctcaaatttgaatggcaatctttatttttggactgatttgccgtgatgccttgatccatcacgcatcgtgctcccaggtgtgtgtcagagtacagaatagttaggtgacgaccacactttcttgtccccgtggtgtgaatctactagtgcgttgcagtcaaatggatcttgaggatcaaatgtgcattctgtagcttgcaacttcattttcagcccatatgagaatttttcgtcgactcaatccatgatgtacaacgtctggaattttgaccggccgcgcgtcatagtttttgtccgtatcgcaatggaaagatagatttcgtaatacattacttgttcatataactacttaacgcagccatagtcattggctagggcacgggacccctaggatgactgctgcggcctgtttagattcgataccgaatggcagggattcatgggataattgctcttttcaaacgtcttgagtgccgataatgcactagaaggtcttttagctataaaatgccctgggagattgtatgtatcaaatatcttagatcgattgagcttacatggaactatatattcagacctgtcaacacataccgaaagcttattcgagggcaccactttatggtcattgagtcttattaaatcgacaacttattagacgtgggacaacaactccgaaaggtctagctacatcgaaagtattgtgttctaggtactctcggtcgttatgagcgtaagtaggacaaaaagccaagggaatacgattttcaacctaactcccggctccacacacggaaatgagaagaagctggtaagcaattaactcctcattttgtttagatttactagtcagaaagcaatcccgcctccacagaggctttggtatttcaaaatggttgcctaggagaggtcttggagtacataagaagttgcacgaagcatgaacataaggtcggaacagtgcttattggacaactcttgggagatattaaaatagtccaaatggtatctaggttgcttgtcggaacgaattcttgtcttgactgtcgtaataaaaggtccccgttcaatcttgagtatctatctgtctgtgctctccgacacttccaccactgtcaggccaagctacgtttgggttcgcagtgcatcttgtataacctattgatctcaagagtctcagtctggtccttctagagttgagagttgtcgtcagcattctccaaagcctcagatatgacgtggaatgtccaaagggatctaaaagcattatcggtacggagtatagtcatggtaaatattagtcttacgaatggactatgaatcatcgagatttttattgtactcagtggatgatgcggaaagaagtctgcatacaatgaacatcaagacataatttcaagcattgtattgatcacctgtcacatctaagtaggtagcacgtagaatccacattctagatagtctaactaaagcggaaatttttcatgcacgataaatgcaccttacttttccacttcaatccggggaacctcaacgctcaaggacactgcgaccaccgtcgacagtgatcctattccgcactcgaatgcgagcgtacgctgttccgagctggacaacgcgatccgaagtaggctcatctttggcccgagtgctgtctgcagaggacgagccttcttcactaactggccgatcggaagaggtgacacttgaagcctcctcattctctttggcattgtgctttgcaatgtccaacagcgctgttggacagaataccagagcttcaccagtcggcaaacgaacaatcttgtgaaagatcgaggccgcggcgtttgcatcagatttctcaataccagctcccgcgatgtgtgactttattgccttgaaccaagctggcgacgagaagcgatggataatagtcacattgcacagctcgagaagtgacggtgaaagagtcggttcctgtgtggctatcaagacgcgggcggctagatgtcgctgctggcggacgacagatagcagtgtctccgtcagatctgcggcttctgtcgacgttgaggtcatgaactagaatcaaattaagtgtcagtataaaagataatagatgactcaggaaattaggaagggccacaaaccttgtgtgcttcatccagagcaatgatacgacctgtgtctcggcggttcttcaaaaacagggaaacggcgatgttgaagagagcgcatgcatcttcttgaccaacgaacgggcagctcaaatcaactattgtcaaactgcccggaggaaatttccagacatcatcaacatcgtgttgctttgacttgttgggacttgcaccaggcacagatccaggttcaaaaaatgactcgagcacctccaagcgcatattcaaaggcccgatttggcctttcaagaaagtttcacgttgcagaatatttctgaacgcactataattgaatccggatttcccctggttggctatagccatgtctcgaagaatcttcatcacaacctatgtgagtagcttattagtacgttttcagcttgaatgaaaggtgtgctgacatacctcaatgtaaagaggttgctcggctttgttgccgatgcccatcaaggtcttcatcatgccgatgttgagatccttttgtggcagatacaatggcttcaccgtcagcattttggaaccgcctgccagtgttttgtatgcctttttcatggcaaggtagttggtcggggagaccaaaacttggacaggaatgcctgaggagtagagataagctgcctcacacaactgcgtgctggaaaatgcagtgaaattgtcatagtgaatgactagtccagccagaggtgatgctagcttcccagctggggaggatgcaatcaatgcattttccagaaggcaggacagggtatgacttttaccacttccttgactcccacagatgaaggcagaccaaggcgctgacacgtttgcatacacaagatcatcttgtgtcggtgtgttgctggaccggttacgcagaccaagcagtccatactgtggaaatgtgtctctctcaagagcttgatcgctatacagacggtcggtgtccaggacctgacaagcagagagtgagaatagaggtgccgttatcagttcctcgtccaagcgggtgttttcgtatggcgatgttttcgaggaaccagtgtcccctttgacaagcttcatatgctcacctatctccaaggtattcatagaaagttggagagactccataatgtaagctcttgatggggatagtgggagctcgcggtggagacaagatgatgagggttgaacgagtcaaaaagaaggcaggaaacagttgaatttaaatcaaaattctagaataatctaatgtcaaacatcacagtaaacttctagaatgcctctgcgatatgtttgttccttctatcgctgtatggatttgcaggactgcattatcatgcaagtgggttactctactatttgcttcatatctccgatactctgatagtacaaggactcctatttcacccctggataggaaattgagcctaagggtataaattagaagcctcaagatgatcatcacggcccaggggtgttcccgaagccacaaaagcttggcagcggatgcatagaagaaaacttggacacgtgacatatacgtaagaagaccttgtgatttgatatgcttcgcttcgctccgcaatcatgttcaggggagacttcctcatcatttcaaaattgcgtgttctctctagatcattatggcaaatcagacgaacatgttccctgcaagtgcctctgacattttgtcgactcaaccacacgatggctggagaaagaatcgaagcacagagcttaccacggtatcatgaaaagcattactacccggtaaaaattggcgaggtgtttaaggaccagtaccgggttattgcaaagctaggatacggggcgtatcccactgtttggcttgcctgggatcagaggtttgcaaatcctacttatcctatctgtttctgaatactgagtattcacgcactctttagggcagagcagtatacctcactcaaagtatgtattagccaaggtaccgactcttccccgattcttaacgagatcaacatgctgcggcgcttgaagagattcgcggataccgatgaaggcgaccatcccagggtggggtttacgcgtcttgcagacgatatctttgaaaatgatcaagcgtccctacatggccgatactactgcatcgcttcaaaacccgaaggccagagtattcgcgtgttacaggaggcgtttccaaatagtatcctgcccaagcttctggtgaaatccatcatacactgcttgtggttttccgtcgactggcttcattcagtctgcggtgtcatacatactagtacgttcaaatgaggtagcggcaccttttgcatctcccacttactaaactgtgagcagatatttcacctcaaaatgttctgatgcaactcgatgatgatagctgcctcaaggacatcgagagccaagagtcacaggatcctagcgtccctataatgacgactgatggagcggctcccgtatacaggtctcgacgagctaagatgatggagcttttaggtgacccgattcttattgattttgggcaaatgcggctagcagaaggacagactaaccaggattggtggatgtctgatttgtataaagctccagaggtcctcttaggcctgccttgggagtatcctgttgatgtgttctctatcggtgtcatggtaagtactagtacacctaaactttgtgatactatgtctaactcaggtccaaaaccaatcagacacttgagctcacggaagggaagaacctattcgaccccattgaccgagtcaacaatcagtatgttcttccgttggcactggcccagtatatcggatatctgggtcctccaccactggagatgattcgcaagagtccactattttcagcatattttgatgaacagggtaagtctcccttgaaccctaggcttcacagttgagcttaccaaagcttttttataggcaactgggtgtcggagccccccatccccaaaactactttggaggaattcgtcactaccatcccaccaggagaggaaaaagaccggtttctccggttcatacgcaagatactaacgtgggatccggaagtgagggccgactcgtatgagctcatgcaagacgaatggatgatgaggcatgcttcagagcaagatctggtggaattgaagaaccagctgttttcataggatcagaatgggcgaacaatatacgtactgtttattaacagagcgcgttgaggattgctttttaataatatcctggctcaagaattggagcgcttacatgaaatctctacctagaagtagttaaatcataatcaagttttattataaaacaggaccgcccagcaatcagatgccgggtgttcaaaggcttgatttcattgctcagatgctttttctttggtttttttaacttatcatgtcctaattctgagatcttcatcttctaggtagaagatataaagaggaagaaatgacagaaaactggaaatatgcaaggcaaatatgaggttgatcaaatttttgtagagagaatgtgtcaacatggtctttcggtgtggcgcaaaacaaatgtaccagtctggtcaattattgagtcccagttcttccatagtcttctccaaggtcgtcttcatgaactccttcataaccaaatcttcaccacaaacggactcataaagaattttggaggtgatgttgacccccatattcatcaacttactgatgagtacgttctctctccgaaggactgcataccgcaggatggacccaatttgagtaatatcataaccagtgtcaatgatcaaatcaatcagcctcctatcaccaccaacgagcgcagcgtggagggtattggggatgaggttcgaccagcctgcggtggggatccctcgaactgtcactccgatcttgtgaccttggaccaatcttgatcgtgttttctcggggggatcgtctgggcgtagatctggagcgaaccgcaacacgaactcggaattttcgtcattcacatccgcaccctgtttgagtgcatacctgacaacacttactttgctgtgccagagtccctcgtacaggatgatctgggcagcatctttgacggtgagatttcgatcgccactcccaaggaaagagaacagcgccttgagcacgggtaaatgaccgcgagccgcagcaatcttcagaggtcgtcgcaacttgaaggcacccgtgaatgcgagagcatcgctggaaagtaacaactcaacgacattgacatggccatttcctgcagcctgtctcagtggagtttcgtaatgttcatccaacaagttgggattgacgcctttctcaaggaaaagattgacgcaagacagtgagccaaattcggctgctgcggtcaatgggtgtgatttggggtgccgtgggatgacactcaaagactcgggtgcgtcgcgatcgatcaaatgagacctgaatctatctcgccgtggaattttagcgccagccttcaggcacttgtgtatggtgccctccaggcctcgcttagctgcccataggataatatagctgtgttcctgtgctgagcagctcttgtatagtttctcgtcgaacatgagggcgaaacgcgggctcgtgcgaatcaaggcattgcggtctttctgggaatgcagattcttctcaatcatgagaatgagctctgtgggtagaatatcaagcgacatgatcgctgtcgccagaggcaatttcgaagtactgggtgctgaagatgtgacagtcgagggaaagagaatcgagatgaagggtttgtaacaaagatgaaagaaagattggctagaagaataaacaagttgccaagcagagaaaggaatccaagatgagatatgagcgggtgggagatgagcacttgaggttgaggaagagagaagaaagttgagtagatagggattttgagcagataaagtgcgagtgatagtaaagccacaatcacaaggaggaaaatcagatgaaggtggacaatgtatagcaattgaggcttgttgcgtacccaggtggccttgtttgtcaggcgtctcccactttctatacccaaggttgtccttgaggctgaattggccgtaacctacggtttacctagaatccaacttgtttatattattcctattaataaacaattgagcattggaaacatttgaatcaaagagatatgtgctatgagtcgaccttctaccttagtcctatgtaaatgaactacttctgttaccattagcaattcaataagaccttacctatataatatctatgggttaagccctcgactactttctaataccgtggattgttcgagaatgttattctctagcatataatccctcgccagagacctgatccgccagcgctattaatgcaatctccaaatcaccgggtccatcgacttcaacattcgtcctagcctgattataaggaaggtattggtgtgagttgtgaatgccacgagaagactgggtgttacgcagctctatcctgaggggacaaaaattgcattcgcctgagcagtcaatcctagccgtaaattcacactcgcctgttccagctctttgggtatattcacaacatcgcgggtcacaaagtcaccatgatagtcaatcaaggcggcttccaccattgaccgcagttcgggatctgcagtaacggcccaagctgccgagagacacattatcacgtatcctgctccaacaggtctgtaaacattggacttctgagcatgttcgagagtttccttaacaagagatttcgattctaccatgcatgtatagtcactgggatccaatgcctggagaatgcaattgaaaaatgtcgtgattgcgagaccaattccatgggtgcggagataatgtgctctcaagatacggcccatgaaggtttctgtcatagtgagcccggacttttcaaattcgactgttcgtacttgcaattcgcccaggatcaatttgcatttttcgtatattggtcggacttccatcgtcaatagcatcaaatcttcgccatcgcgtatagcttgtttgccgcgtctcattagaactggggctcgcgctagacatcgcaaaatctggccttcgggttgatcttgatcaaagtcatttttgactaaggaatcccactcctcggagctcaggtcgacagcatcattgtataagccctcgaataacttaggtatatgattagcttaggcaagaaatgtggtggagtcgtgtgtggcctaccacgcttccacgtaaagagaggaacaatttacgctcaaagtcatcgcgtggcccaaagttctttcgcgcgtgcagaatgctggcggccccttgcgcatgtcctgatatcatttgcccgttatttccgatgaatgtttggcagaccaaaagtatcatgacagcacatagtgtgctggaagcactcgcctggactgggtggtctagatagactctcagggtcttgagcgcatatgaatacttggctagtgtctcagccgaaaccgattgaccggtgcagaagcctgcgtgggcagtggttacagcgtcaactgcgtggtcgagtgcttcgttgctgccgagtcgtcggggtatatcttccaggaaagtgccgaaagcccaccacagattgtaccggaggtcagtggatcgttttatggcgccgacgaacgaattggtcaacgacatcatactattgccaggacatgcccggggtatttcaaaagaaaaaattactttttctgttgattttgatcttgatgtgagagtcatttgaccgcttcgatttgatttgggggaaaattgttgctctttgaacttgaatcgttgctgaccggaccccacacagctcactttcagacgaagacatcgtccacactcaggttgtttctcgtcacacttggcatattattaagattagcaacgtgtgatatagtcttatggcacgtacctttttcttctgcttgcgacacgcgtcacaggcccgacctgttgggacgcccggcatggtggggtgaagacctgagtggagaagcggagcgtggatctcaaagcaaacactggaggctttcagtagcgcgtctatattcagtgcggaatacgccgtagacagctacaaaatcataatatattgcactaaaaaaggctctaagcaactaggttgaggttattgcggctgcccagtctaaccgcttcgggtcaaatgtaccgctcctcaaggctgagttgtacgtcgctgattggccggtttattagctataataacaaggctgaattgctcggtctaacccgatatgaacctatagcgcttcacgcttcattttgtggagcatcgccatttagcccgccaaaagctacgctatgtgtccagatggtcttacggagcgcatgagtgagatatatatttgatcgtcatacctatcctcgtgacatccgatattgcacccttatttacagcttagcttgttcgagagggctcagctttctcaaaggaggccctcctctgcttccgtcacctgccatcggccccttcgagtcacctccctggggcgggttcatcctccacttttggcgcaaagcttcaggtgctttgttctcgaagcagtccgcgatatactggcccaggatagggaggaatttgaatccactaaaaccaggttagttaatataaagtcttactgtgcaaagtgatagttccatcaacacttactgtcctgcaccaccagtagccatgaataggccctggatggttgggtggtggtcaataataaagtcaccattaggggtatccgtgtaccagcacagtcgacggttcatccaagggcggtcccccagcttagggaagaactgacgcaatccctttcgcagcgattcatcggcatcgtcgggcagatatccagtggccgcattgctgctttcgagctttggcgatgagagtgacttctgaacaccgtccacattgacaacgatatcagttgcatatccgtaaccgtggcgtgccatcttgagaacatttgtgtctggtgtgggcgggaacgagaaaacaccagagctcatgttaatcatgaccgggatctttctcatctcgagagcctcctcctcggtcaactgaatgaaaccaacaggctggccagaggaagatgccacatgacccatgtttacaagacggttggtccacgctccggtgctcaagatcacctgtgaagcaagcaatacctggcctccaacaaggttgacaccaacaacgcgcgaccccaccctgcgcagggagacaacagtaccgcgaggcccggcaatgatggaaacgcccgcgacagtacacttggaagcaagcttctgaatactgcctgcggcatcagcccatccacctttcggattgtgatatccgttcatgccggaaaagtctgcttgaacactagggtaaagtttgcggatatccatggcgtcgtcgagatcgtctaatttgccacctgccgcccgaatgatagtcttagatttctctatatatgcattcttgggcgtttccgaaaacatggcgaatcccgattcaaagtattgatctttgtactcggtggtccatccattgtatgcttcccgggccattcgagagtagattgggtcggcatagtcagcgcgaataatgcgcgagatgtcaacgctgcttccatctgctgatggtggtacaaatcgatcgacgacggtgatatccgtatatccgcgcttgttgagttcaagagcggtcgaaagaccgaagacgccggcgcccacgatcacaatggagtctgtcttagctgtagtcattttgaagaacagattgacagccagagggattttgtcaaattgcaatcggttggaggatttcccaggattataaaatgcagagggtgtcggtaaggaaagccggttcagtaccgtcttggcgtccggcaaagtcggatccggtccgtgttccccggatcggaggtagatatgcatagaatgtttacattctaaactcacgttgggttaacgcttagccaatcctcaaacgccctcccataatcttgaagctgcaggaacaaggtatcaccgccgctatcaccgccgctaaagtccatattgggatctcccggaagcccggaaaagtccatcctcggtgaggtctgactcggcgtttgtataggatcttcagtctgttcaggtgggtaggtgacgcactcgggagccactgtcttgtgacctgatatcccagcagatccaatcaaagcaaaatcacgttcggtgatagcgccagccgaaggatccccggagcatccgacactgtctttggcaagttccgggccaaagatgtcactagcaggatctgatatattgctcgcatgggcatatactaaaattttccataataattgcaagttcacagaccacttctgacgggagttggttcctgctggggcggtgttgtctgtcataaggcctccaggggaaacgctgtcccggagttgttggagttgtcggacctagaagtgacatcaggacaggtgtgccaaagaaacagcttggaaaaagaactaacctgtcgatcaatgtgtggccaccgacaacccatattgcgtaggaatctaaggcatttctcaaatcccgtttgcgcctttctcttaaaagcttcatcctcgacaaaactatgttgaagatagatcgtagcgacaattgccacacattgccctaaagtcgggtcagatacctcgaagcttttggcctcgataagctcaagaaaatgaatgacccagcccgagtggaaggtcagctgctcgaaagaattccggaggaatgactgaggcattgtcctccggaagttccgaagtcgcatagataaaagaaacggatggtttactaaacaaggcaccgcgtgccaaaccaactggaagaatagccatgggctccaatagtcacgatgagcctgaagttcggcggggggatggtcttggaaccgacttgcatgaagtcggaacctaagtggcatgagactctcatgctcacagtgtcggaaatttagcatggcgtactcagaatttggagaccatgggggatgagcgtcaacgcctacatggcttgcggcataaatacatgccatcgcccacagctcgcttgtgtaaacactgctaccattgatgccaatatctggcttggagtcacagctggtaccataggcgatctctttgttgaaaatcatggttgccaatggagagacggtttgaccaggctctgcaagtaagtccaagctgtctccaggtggatgtagggacccctggaggttcctaagcatgacaatacttacatggcagagcttccgctcatcgcgctcagtttccaaattgcttagagactccaggccatttattctgaggtttctcatcaaatatgtggcaagtgtggtataagaccccgcgcgaatgatatgacccgctgaacagatggaatacaatgttaggaatagacacaagggcacgggccgggattgctttacctgtgaactccagcatacttagaaggcatagggtctggatagtagatagctccacagtacctgatgccaaacgcatcatgaccatctgagaggccctttctgtttttattttgatctccagttgtatatcctggtcaatgatccctggtcttttgaaacggactccaagagcttcaattgcgagtagaagctcggggtcccgcttccccagggagactagagaagatctgtgggggaataacagaaggggctgtgcgttacaaaaggtcagataaagttcagcatctgggatcgcaggtgatccagctctatttcatttgttaatgaatgtctcctgcgagtatatcccaagttgaactcacatagaaaagcttgccgggggtggaagctctggtatctgagggttattctcgggaacaactggcgaagggaggtgatttgaggcaggtcgcctacgagttcaatcagccaaatggaacgaaacagcacggaaatcagaactgacgtgatatattccaccaactgttccagtttcccctcaatgccggaaatgcgttgctcctatgccacattagaatttgcttaggtctggacatcaatgctacttaccatcatcttctgcgagtgcaccaggccttcatctacaatctcagcgcctgcatatacgcattgttgacccagtcgctcgcagtacgagcaaatcggtttctcccctgggcaacgcgactttttccggctgcgggaatgtcagctccaattggctctcagcttaggacacctgaggttcaagctcaccgacatggctcacaagcctgacggactcgttttgatggtctttcatcttcaattgaggccattttgcaaatcatgataaaaaaaaagtttgacctgaactgttccacgcgggtaaaacgacgatccaaggcggggaacggctgtgggtccgaaaacgatacatatcaagtacaatatagcctccccagcttctcatctatattcctctatctacgctcgatgggctttgactgtgagaagaagaacagaaacaacacccgagggcacaattcagtgaaagacgtgtgggtttggttgagacatcttcgggcactgtcacaataatcccaaatgggtttcaaaagcgccaaacttgggtgtttattctacactcattcgagagatggtcgcagatatcagcatgatatccaattgcaagatcactttcctcttgatcatgagctatcgctatccgcccatcatgaaactcgaagttgcgtacaaagtggacccgtattatagatcatgcgcgaatgtgtactccgtacacggcgtgctatacatagcactgggatgtatatctgtgacctaaacagtgtgagactgttcaactctgcctctcaaagataatataaatgcaaagtcgtaatttccacatagtgaagatctacgatcatgtgatctgatctgccactaggctgacgtcggctccgattccccaggcttttggccactcctcctcatttcactgacaattctcccagtctcggcgcgctttgcattatttcgaataagcatccttcaagattgagggaaacttgaaagtatcaaaaatgagtgacgcctacgaacgcgagcagtatgtccccctttctccaccttgtcccatcggatgtcgctatgaaaggagttatgcatcgatttgaatgctgattttgaaacaggcagaataatgcgctcctcaattccctctcctcgaaggtctcagctctccggtcggtgacgattgatatccatgataatgcgcgggatcaggacactctcgaccatacggtatgtcttgatcaatctttcgctagtccgataataattgagggcatgtgtttgctacttgcagatacctttgactggcgcctcggtcgggttaacttgcgactgacaatcttaccttcttagaccgatgtcttctcctccttctcgacgaacctcaaaggtagcgctactcgactcacgcggatggcaaagcaaggcgattctgtggccgtgttgaagattgcgggcatgtgtattgctgcgggtgtcgttctctatatcattcttggatggatcttttgaaggattcttacgtctttcgaacctgcttctccctcgtcaccctttacccatgtccccctcgatactcgacacccttgctggaacgagactcgtatcgaaaatacataatccgatgctatcatgttattccatcgtgctgggctgtcttcgtcttaccgaccgcatatgtgtttgactcgatttcaacatgacatggcaccttggtttgcagtgtatgctgtgccccaggatttccccgtcgttctcgatatactcgtcgttctattttcgggctgtgcctgttatagacattgttcctaagagcgtcggccacgcgactcccaccgcctcctttgacccactctggtcagccctgaacccctaggttctcttgattgacgtcttatgatttgcaaattggcccaagacttctggttctggtctcttccttggagcagccgactctaagtctcattgcgacttgacattttcgcttcttcccacctttccatgtcattaatactgtgattactcgtgaacataatacatacttggagccagtctcgctggatctgctcagccatgctctactatctcgttgcgtaattgaagcgcaccatggatcagctggatatatatactaggtggtaaatgcaatccagtggcacatgttgacatcaccaccaagtggtccattaccccagcttaatatatttagatcaacgcctagatctctacttaaaaaaactctaatcgacgatcgtgagcttgagctcatctgcaccacggtcgaccgacaacactaaccaaaaacggaaaccaggtagtatagacctcggatacaatgagaggccaattcggatttttcctactccggtcttcttgacattagttacatgtagcagtttactatcaaatgaagtgcatttataatgttgaacacttgctctattgtgtcgtgtgccacatttccacgtgtcaatatcacagggccgttttcggccaacatgtcttggaatgccaacgtaagttccggtaaccaatctcatcaaatagtatcagacttgcagtttattcgcaatcggtcaaggccacttgcctcattggaccccattgtttccatggccacgacccgatacagagggtgtcatgccatcacggcagcaaccgtcaccctcggtaaatcggttctcattaaacagtcagtaaacttagccgttgttaactagtgcagatactaagaagggaacattcttcacgggaacctgccactggtaccatagtactctcgattggaacattatcggcaccaacagaagctacctctagctgtgaactcattcatcgagatccgggagccggtctctggtggacaataaggtaaccttcgatgcaatgtatagccaagctgcacttccatgtgtccggcctgcgcttatatccttgttgccgaggtagcattgggattctgaattcgaagccggctgtgatggatagccgaggagtacatacccatgacggtattcaaagcctaagcgaaacagaaaccagctctcgttttcagcagccgggtgtagtcgtctccctagcttacattagccctcgtgggtaggtagctgcgacatactccgtagccgatgatatgaagtcgtcgggcgttctcgggtatgctttgacaagatcttccaggtttgacttgcaattgcacatgttctgtctttggggatgatggatgtttagaatatgagaggattgaaaaagcctcggctctgttgacatgaagtccgatctatatgttgtatatgatgtgcatcacacgccagatctagaccacgggaacccccgaaccaaaaaggcccgaagaagaccctgattgcaccgctatgtgaataaattccgctgtacaattggcccaaccgaggccctcgtaagccgtaaaaagtcttttccggatcttggcaggcggtcgatccacgcgatctcttttagttcccgctctagacattgcaacctcccctggcgatcactggaagatagctggtcatactctactttgtattcggcatgagaactacgcaaaaaagatatatagcacttgttctgctgcgcgtggatgcatgtaataagtacttttagtatgccctgtttatcaggtttcatagccgtgttttcttgtgttttgtgttgtttctttcggttttatttggtgggtcagatctcttacgatgtctggctttagcaaatactattggtacaccaagacgcaaagaccccttgacgtgcttcttatctagccaatcttgaaaaacattaaccgaagtgataagctaagcccccagggtcgaatgaggcgtttactgatgttctgtaattggcttaacttgctcttggacgttgaacatggaaaatggcctgatgcaaatcatcggaatacatttagggttcaagcttttacatgcaatgctagccgtatatgttgtacagtgcgttgagcggtgtaacatgcctagtttaagattccgacagtgaatcactcacgatgacgacatgccttcaataattacaccgatgtctactccgtacctgggtatgtacttccaaggttatctgcatttacaacatacgcgtaaacaacgagtcccacattattgacttttcttcggcatgatgcaatccaagtggacgttctggaactcaccgaagataatttcacagtggagagtctgtaaaaactcaccgtcgatgatctgcttggtggggccgtaagaaaatctttgaaagttggtagagtatagctctgaccctagtcatgttgagtgctttatagacttcgaccgtcctagccgagacctcgtgatggtgtctttagccaaaatgaatctaggctttcagggctggatcaaaagattagattagagcgggtcgcacgccataggaacgggtcttgtccagttggtatcaaaaggaaaaaaaaagataaaaataaaagtcaaaaacaaagtttcagcctaaatcctcacaccgagaagcccagtataaacacggcgaataacagcgcatatactcggggagcttaaatcggcacgcaatcgggattccgatccggtgaagcggaaattcccgagttccatatgtggaaggcatcccgatcccagggctaggcctgcagtcggcttgtacgatcgggagcaggccgagtgctggctttcatgcactgcactttgtatgtgtatgtacgtatggagtatatacatgttacatgaaacacgaccgcagaagtgggtcacataaggcaccataatcaacagtttgtgtgttgtttgtccgagatcttatctatgtttggttttacccttccaaggttaggtgaaatccctcacaatatatctgacccgctttgaacctatcacgacgccacgggccttgacagctaggcggggtctggttagtataggcggttcccgctcttaccgcaatgctcatcagggactctacaatatagtgatgtaagtgttgggttacagtaggcggttggatcacagatatttccgattattgccggtgagattaagataggtcaagcttagcaggtcaaagtcaaaggtggcttcatgcatcaatgtgcattggggattttcaggcacggtaactacagcttacaggaagagacgatcgcatttgaaactgtatttgtcagtgtataacttatctgagcaatatcggagtggcggcagttcaatgaattgagaaagaccaagggtccaagcccaaggcatattttttaacgagtggcgcgatcgagaccctagtagacaaggattatgtgtaccgtgactggttaaatgcagccttgctaactagtatactttgtagatctcctatttaccatcaccaaagtggattttttagttgacgatcaggttctgaagtatgaaataacgctgttgtgtgactccatgggcatacataggtacgttgacgtgtgcatcttcagggatcttgaaaccatgcgggaagggcgatcccgaggtatgtacggagtatgccgtacaacatcacatggcatgatggataagcgtatgggtaaaccctagacgctatagttagaccggggtgagttgttgaatggtttcggatgtccttcgtccatgtcatattatttggattttgttctggatacagaatcccttgcatttgaaagtaaagagactaaataggcatcaaatagtaaccacgcgtacgtactttgtaccttgtagggagtaactatgtagggtctggtatgatagcgctgacgtaaaaaaactagacactgatgggttttgatgtgcttaaccggttaagatggttctaaggttcttcacaaatctcacaaatcctttaaaatcctctaaatcccacttttgctccaattcttatatttctcttcattatatgccaagccagccttacatcgcgcatccgtgagcctatttccatttgagattagtcatttcgcatctcggcactgctaaaggccccaaaaagaataaaaaggaaaaaaagaaaagaagaaaagaataggtcgccggaacggcacaactccactggggacccgtgagtcggaccagtcttgcgtatctggccatgttccggtagatcagtgatagagaaaaaacggaaaaaataccggtgccatacgccagtacgcagtaacgcagtacggacggagtacacttactagccttgatctctttactcttgcctcttctccttcttcatatttttattccctaacttcgtcgacatctccgcccattgctgcgggcaatttccaaatggctctcagcttctttagtagtggcgggagcgccagcagcgccaagtacttcgacatcaggtgagtgggggaccggatagcccaggcgagcgacatatctgacttctacaggttgaatgatgagtatatcgtgttccgtggcggcgaacatgaagccgccagtgcgcatctgcggggcactctggtcctgtgtttgtccgagccgctcaccattaaacacctccggctacagctgacgggcatgtcgcgagtttggtatgtgtcgcattcctaattctgaatcaacaccactaacaagccatttgcgcagctggcacctcccctccagcgcagccgccggtggccgaaagtcatggcgtgaacgtgtgttctatgagaaaacgtggaaattccgggacctacccaaaggaaaaaccgaggtcctccctgctggcaactatgagtacccctttgatgtggtacttgagggatccatgcccgagagtgtggaaggccttgccgagacatgggtgatgtaccgcttcaaggccgagatcgggcgcaagtacgtcaaggacattgttgcgcgcaaaccgctcaggatcatacgaaccctggatcctagtgctctggagctatcacatgcaatggtaagtggtcatatcggcctgactgtcagattcttactgacaatcctcccagtccgtggacaacatctggcctaacaagattgaatactccatcagtaccccgacgaaagccatcgtgttcggaaccgctatccacgtcgatttcaaattgattccccttctcaagggtcttcggatcggccaaattacgtcacagctgatcgaaagccacgacctcaccctcaatccggaagaccccgattccattcgcaacacatacaagaccacaaggacaatcttgagcgacgagcatgagctggatgagaataacattgagatcatcgatgaagcggcggaaggataccaatgcaagcgtatcctagacatgccgcagacattgacccgctgtctgcaggatacagacaccaaggggattaaagtccgccacaagctgaagttccggattcagctgcacaaccccgacggccacatcagcgaggcgagtaatagtagaatccctggccattcttctgacaggctaacatctcaatgcagctccgggctacgcttccagtttcgattttcatctcgccacaccttgccatcgacgacaacaacaaccttcttgggcaaacccctcaatctacccggatcgccgtcgatgagtttgcgcaccaggcgcctcccctttacggtgagcacacatttgatcagctgtatagcgagctggatcccagcggctatcgcacaccaggccctgccagtagtccgggcacgcctttcactcctctcagtcgcaacatatccacagagaacctcgcctccatgaacgccctgaccaacaccgatatctcagcttcggcactgcaccatcgtctcacaaacctgaacgcaagtccgctccaccatcctatcactcccggtgcagtcactcctggcgagggcctgcatggatctcaatccccaacagacggaatcccaattaatcgccaattgggtgtctctaatgactacttcggaacggcttccggatcgaaccatggcagtccagaactctctcgtcggccatccgacgaagtggagcccgaagcccttccctcgggcatggcaactcccttccacccccagtacgacgaggtagagactctcagtcgggttcccagctattcgactgcagtgcgctgcgccgtgcgtccccgtgactctggtctccccgattacaatgccgtgattgctagtagcctccccacgctaccagtcccacagtctccccaacaggctcatatccgcagcggccgtgcaaccggaccgggaactcccctagaggtgcagaatcgctccggttacttcaattctcgcggcaccaatgctgacgatgaggaacgcagacttagaattgcgcaagctcgcgccagagcatgagatgtggccacggaatccttcgatccacccatgatctcccgccttcactttccatcaaaagttctccttctgcatcggtgctggacactgagacccacgcgaagcgctctatcccttaacccttagccattttctctcttcatcttctccccccatcatgttctttttctacaagcgatcatggtccccagcattagctccccttttcaagcctcagtcccagtcaatcgggcacttctcatccagcattgttctgaatgtttctaccgtccatcagcggcaacttcccatctcttcttacttctcattgccttttctcccaacatctcctttcctctggcgttcgatcatagacgggcaggaatactttcatagacggtcacgggtgttttgatctttctttcacttttttttttaccttacgaatgagatccgatatgaacgagctgcatgacatttaaatatgcctatcagcacgagccatgcatatgagcctttgacgcatgtacttaattactttggtcgacgagatcaaagtcttcgatgctcaacagattttccatctttactgatgatatcatatcccgattaggaaattagccaacgatcttaggtcatcaatgaacctgcgggcccagcccggcccaggtggcatgactctgcttcttcggtcgaaggtcaaaggtattgttcacttgagatagacattggaggggctattggtacatggcttttgccactttcgattatcgacaaatttcatgttcttcctaggctctagtgagtaggtctggccagtaccctgttttggatagtaagcacaacttggcgcctcgagttcatatgtatacattgtagtgtagagccaaggtattgctacatttacgttcgacttgacacgataaggttggaaaacttgaatatttgggtggatatgaaagccacagcatcgagtacccagagtaaggtcccgaggtctaacaggttacaagggcacagtgacctcattgacatttgtcgatcggttaagactgcactctcgccttcatttttacctacaacagaaagataatatccaacatagtggaaactgttggcccatcaattccgtcgcgtaagtctgctcgtccgcaatgatcgatctctactgactagtccagccatagactagcgctcccccacccatcggccgtggtctcacaccagccaccgatgcgaacatccctataattcgttgtttaagccacattatcagtcgtcagctctggttttgacgcggataagataacttcgacttcggttgatcattgtcgacgtcttgaattaggccttaccccgccgtttctccgcgaccatgtccactccaacgagccccgcggatgtgaaactgcctcagcggtctaacaccgtgagcagctccttcactcgtcgtacttctctgagtgacgatgaggctattcccgacggtgatagcaatgaggtttgtatccatggtgtcctcgaagaaaagaagtatattggactgacgatgtatttgtttccagactactaatctcctgcttgagcgtctccgagcatggaagcatatgtgcggatatctcgaggattacttctctgctaccgccaaagtgcagaagtcccagtccaaggactacgagaagatcttgaaggtcagtggttaattcctatgggtgatacccggcactgacgaagaatgggaatagaccgtgaacgaacccctcaaggaggcccaccacttcagtaccagcggaggcggcgtggctggtatgtttgagagtattcgctgcaacacccagggcatggttaccatgtacctagaaggcgaaaagaacctaaagaccggcgttctccccaccctcgagcgtctccacaaagagatcaagaacaagtccaaggagctgagctctggtgctagcaagggagctaaggccgtcgaaaaggcgcgtaacctgacgcagaagcacatcgagcttctaggtcagaacgccgcctgcttcgacgccgccgccggcagcaagatcgagccgcacaatgacccgtacctcctcaagcgcggcatcaaccaccgtctgaacaaccaagtaaacgaggagaacaaccaccgccaggatatcctcgccgtgcagaactccttccagcagttcgaagcacacgtcctgcagaccgtgcaaggcaccatggagcaattccacctgcacatgaacgggcaactcgagcgccagcgcgccatgtacgccgacatcctcggctccgcgcagcgcatcccaccggactttgaatggatgaacttctgcgtgcgcaacgacgcaatcctggtcaacccagactcgcccccgcgctccttctccagcatcaccttcccgaacatggagcaccgctccacacagccgctcatcgaaggctctctcgagcgtcgctcgcgcgccctcatcaagggctacagcacaggctactacgtcgtcaccccggcgggctatctgcacgagttcaaggacaacgacgatttccgccgcgacccttccccggagctttcgctgtacctgccggaatgcgtcatcggctccattgacggcatcaagttcaacgtgaagggcaaggacgtttccagcggcaaaatcggaaacgccttccacacgaacaccgagcttagcttcaaggcccacacccccaacgacgcggagaagtggtggaccgttatcaaggaggctacccgcggcccggtcgccgctgcccctgctgtggcacccacgctcgcttctcccacggcgacgtcggccgcccctacctcgcctgctggcattgctagccccgcccgcagcgtgtccggccagggcctgccgcccacttacgccgagaaggagatggagaagaccgaggctgcacaggctgctgctgcccctcctgctgctgcccctgttgctgctgcccctgctgctgctgcccctgctgctgctagcccgactccgggacttagccgcacggctagttcgtctagccacttctacacctcgcccggtggctccgctgtggagaagtcgtgatataacctctgtctcgtttaggcatatatatttaagctcttttggttctgtggactttacccccccatatatactcaaataacgcatgtgcatctcgtcagttgattagggtgtagcgcccattcatccacccggagagcgaaacataccttgtcgactggatatatacctctaatgaatttctttccacgttaaaattgcaagaatcagatatcagcgctaactggatcgaagatcctttaactatcaaatacacaaagcaggcagagttgtatcgtcaaatcatatcatagcctatgctggaaatacacatgggcatgggctagctagataatcccagcaagcttcgcggcatacatgttcattgcctagtatcagaaatcctcaggactttccaagtcattcagcttctccccgaggaaacgtcctagcgcggcgcatttagactccagcgcaagcaagacggccggcgaggcagagaggttcaggctggccagacgcgcaagatcagcgctgcggtcaatctccaactgggggtctccgtgaccgttgtgaggcgcgtccagagacgcaggtgcggcagccagtgcgcgcgatatatcaccctgtgagtcctcaagcgtgggagttccattacctacatcaggtacggtgtcaactgcaagggagtcggcgttggtgccgccgttcggctccagtgcgtctagtttggatgggccgacggcggccacgaggactttatccgcgatctgggttaccacggccacggagtcgtcaagttcgaagacgatcgagcctacatcgcctagagacatcgacttggcggtcacgtaggatgaaggatggctggctgggttgacgcccgtcaagttcccgcttgaggctgacttggcgtagcatgtgtaggcggcgccgtaggttgcgctaaggttgcgcagttggcgcgaggagagggaggagccgtgggcgaagacggcgccgtttgttgcgaagacactataaatagatacagtcattaggtgtatcttgtggtggaagcacagctggcatacatgatcgttgtgatctctggcggggacaggttgtcttccaagaggtcgcttagtgcctccgcgtccagcatcttaatatcggggagaccgggaatcatggtgtcggtgttgtcctggcctaccgaaggcgtgtattcctccacctggttcgagggttcctcctgcagtgatacgcgatttgcttccgcaatgcaatctttcggtggtgtccacgagcagtcttccgggaagaagaagcagttgtcgctataggcctcgtcgtgatggtcgtattcgattggctcgtcggagtagtccaataggttctgagcaaactttgtcttgtgacgggcccagtaaggcagaaagttcggttcgaagggagattgggagataggtagggaaaaagttgtcgaggagcaatcggatattgaatcagagaagggaactggagaaggttcgcattcagccatcttcacacccatggatgcggactggacacgcagagacgacaatgtggggtatgtttaattcccgcagaaaggtaaaacgaataaacagagggcacgagggaagcaggtaagctctcatgccatgggcttggcaagtagatgagagggagtaagggaatacgcagagattcggatccgtcgactcgacgcgcattggtccaaatacaaagtcacgatgattccaatcgcgtccgatggtacacaagaaaaatcagagcaacagagctttatgaggcctggtatgaccagcaggtgtcatgaggtgtgtgtgaggcggctccgcaatgggagcaccatgatcgggcaagtatgaaggaagcgtgcacatgagcagagacttgattgggagaggtaaaggggggatacatgaaaccaagagctaagcgcggcagtaaaagaaagtcggaaattaaagaaaagagacgggatgcgacacgaagccgggaatggaggccaatggtaggaaagggatcaaccgggagcggggggagaaaggtctgaggatcatgcaagaggatgttcacgaacctggtctgcgaaatgtggtaatcggggaattcgaggggttcgaggggttcgatgttgggagttcggaggttgagttgggaggaaggaattggagatcaacttccccgttgatgtggagttcccggacgttttaacaccgaggtatatatacggctgcatacatatgtcgacctaatagtgtagctatcttatgtgtcatttgattgttcaactcggaattgtatattattacattcctacattgcagttcattattagccgtacctaaattgttgattatatatgtacttgtactccgtacaggtttcagattgaccacatgctggacgcctagaagtattaaaagtgatagactaactcacagaatctaattggtctcagtcatatagacaatatgctcctgattctataacttataagagctacctaggtataagagctatgtggcacaacgtcatgtgccccacactctcctcacggctgacaaaaagctcctttgcccctctgtctcctcccccaatgttcgctcgtctttctcctggggtcctcagacaaagatcctttgtaccaatcagtaggctctattcagatccagctcacggcccaattattgaccagttaccaggatccctagcaaccatggcttccgatccttccacctataagctcaaccgttcgtggacagtacttcaacatttttcgacacaatcactaacacaatgggcacattatagacacgatgatgcgggtcaaagatccgcagcgatcggtggatttttacaagttccttggcttgaccttggtcaacaagattgacatgcctgaatggaagttctgcaactacttcctggcgtataacggccccgcctctctccagggtgaccgtcactggactgatcgtaatgccgttctggaattgactcacaactatggcaccgagaacgaccccaactacagcgtggtgaacggaaacacagagccgcaccgtggcttcggccacattgccatctcggttgacaacattgaagccgcctgcaagcgcattgaagatgccggctaccccttccagaaaaaattgaccgaaggccgtatgcgacacatcgccttcgctaaggatcccgatggatactgggttgagatcatccgtcgcgccgatgaggatctcagcaccaccaccgaccctggtagctatcgactgaaccacaccatgttgcgcgtgaaggatgccgaagccagcttgaagttctaccaggaatccatgggcatgactttagtccgcaccattgagaacccagagaacaaattcaatctgtatttcctggggtaccccgcatccaatcccgatattaaggagggtagcaaaaatggagtggcggagtgggaaggtctgctcgagttgacctggaactacggcaccgagaagcaggaaggccctgtctaccacaacggcaacactgagccccagggtttcggtcatatctgtaagtggattatcatacaacttctaattgtttctacaaggttcctaacttgacataggtatctccgttgacgacctcccggctgcgtgcgcccgctttgagtctctgaaggtgaacttcaagaagcgcctgactgacgggcggatgcacaacatcgcatttattctagatcccgatggatattggattgaggtggtgcagaatgagggaataaagcgcacttcaaactggtaggatatagaaatacaagccaatgcatgtatatcaatttccagtcctgcttatcctctaccggaccctgccctgccttcagaacattttgatctcggggggcaagaaatgacggcttaatagcatgattggttcagaaccttggaagcaagccacccgaccaaactcacatggatttaattgcacatatttcagccagaacgccatgaattatgtatagtcatatgtaacccccccttgggccttggctaatgggataaccctatcctcttttgatatacgtacctgcctgacttttgaataccgccttcctaatatggtgcgtccattgattctgccactactacgtagtaggtaccgagtacggagtatttgaattcagtttatagtcaccaacttttatcatatcaactacttcatcgttaacaactgcttcaaaaaccgcttcaacaactgctctgtcattatcaagggattaaaacatgtagggtcgaattagcagtggaggggggtcattgtaaccatccgctaaacgatattgtggggtaaggtgctgctttgggtatatcagtctgagtaatcagtgccatagtgagccctcattggacctccgcttcatcacgtggggtatttgcgcagctgacggactctgaaatttacccagtgagcctgactctgagcgcccccgtaaaagcgcagaggaaatatgtcacggtgacctggcccagctaatggcttgacaatgagaatttcgagaatttcgagttttgacgcgggatgaattcatgtgatttcacccatttcgtcttatttgcggggacacatcgccacacaccattggagcaagccacaacctcgagcttcagaactcttggaagaaatcctcgaggacgtggcctcgaaattataaaccatgtcggctgagccagagaaaacgaaaaaggcaccccgtaaacatgtcaccactgcctgtgtgccatgccgggagagtaaaatcagggtatgtgctctgagcttgagtcaaaaaatcctaaatggcttcaatcatctaatgtgcctgctaccagtgtgatggagccactcctaactgtcagaattgtcagcgaaagggaaaagaatgcaaataccaacatggagacgacaagcgcaagtaagtaccttgtttaatgtgcggaagtgcctaagcgacgaggcagacctcataggcatacaccacttcatgttcttttgctaatatgaactagagtatctcttcgggcctcaacggagctgttctccgcccgcattgaccaactttgtcattttatccaggagcaggggctggtgcccccgccaatgaatccagaggatgaggctggcatgaacagggttttagacaccctccagatcccgcgcggattccctcaagcctcagtagtggccgatgaaaagcgaccggcagatgatccaacggcctctgggggctcaagcaaatctccgtcccaagatccacctgtcgtaaatcccaagggacaaaccccgatcaccaatttggttgcttccggcgtatccccggcgcaagatactatgtctaatggaaaggcaccgtcgcccgagggctggaatccctttggattggtaccgggtgcttcggacaatcaaaactttgtccattggggctttactttgccaacagccgaaagtttggacactatttacgccaatctcaacggcgggccgagagcctctgcaatgcctagaatccccctcaacgcagaaatgagtccggatagctaccagcttggcatggatatggcccagcagccgggtgttctgctaagccagctaccccacggcggagaaaatgattcggatagcggcgaagaggacgaagctgaaaatgacgttattgagcaattgtcgcaccgaattggcactttgaaaattgcgggtgatggccatctgcgtttctacggtgccacgtccaacctcaatctggtggatgtatctgcgacacagcagcggcagcggcctgacgcacggactgtgcgccacgatggtcaggatattttaaatcatctccgggttggtcaacctgtggaccaagccctggaagatcatctggtggagctatatttcacctggcaaaaccctagtacatacattgtcgacaaagagatgttcatgacggcacgaacgaaatggcgcaatgagctcgatgatactccgttctactcggaggttctaactaatgcaatgtaagttcacttcatttttcggtgctgaaggaatttgctgacttgttgcaggtgcgcgatcgggagtgccttcgaggcacgctatcaccccacattcattactttccccaagtctctctctgaattcttcgcagaccgggctaaggcccttctggaaattgaactcgactctccttgtgttgctactgtccaggcccttgtcatcatgagctgccacgaaggcgcatcaaatcgtgatgctcgaggttggctgtatagcggtaggcatatatatcttgaagataggaggcaagtaacgctcattggctaattgctttgcagggatgtctatgcgacttgctttcgatcttggtttacacctagatatgacgacatacgtgaacaagggcgaaatcacccagcaggaggccgatgtgcgccgtgcaaccttttggggaagctatgtggcagaccagtaagttttcgtggttttcataccgtcaatatctctaacagtaactagtttctggggcttctacttaggccgcccgttccgcatgaacgccggagacataggtgtttcaaaacctggatctgctctttatcctgaaaaggaacaaaactggcatccatacggccatcaagctgctcatgggctatctcagaacggtctgaggaacccaatggagctaatatgcaggcaatttgtcgttctatgggagatgatatccccagttggtcatattttgtatgtgacttatgcatattatccagcacagtgctaacaagcctttaggtatggatgttccgacatctctcggcacgacctgcaaagaatctgctatcaagtgacggaagatttgtttgcctggaaagcaaatcttccttctagccttcagattgatctggacgatgatacatcgccaatattgcctcatttgatgatgctccagtcagtttgtttcaatataatagatccccagaatcatactaacagtctcttgcagcatgcaataccaccagatcatcattttcttccaccgcccatggctttccaaaagctatatccagccccgcagccctcgtcaaggccccgggtatcaccatgcgcggcgcatgtgcgtggagtcagccaccgccatcgcacgactcctccaactcttcgagaaacactacaccttccgccgcatgaacaaccaagttgtagcgataatattcagcgcagcgctcatgcttctcttcgtaacagtatccagttctccaatgagtccaggcaaacaaagtgacagcccgacatacccccgcagtccggaaatggtagcatatctcaatttgtgcttccgggctctcgatgaactgggccaatcattcgacaatgccaagcgcacccgcgactaccttgttacactccagcgacgttggcaagcaaacatgcgccgatccggctctgcggcgaaacgtcaaaacagcagtgctaatctggcgtcgctaggctcgcagaagccgtctacactgcacaatagggctgccaatgcccaaggaatagatggctcacggaaaaaatcccgtttatctgtttcagaggtccctcccaatatgcagtcaatagcacctgtggcgaccaaccaatactcccgcctctcacagcaagccatgcctcctcatcaccaatatcatcagcaaagctcttatcaacaacaagccccctttcccgtccccgctcccgtccccgttcctgattcccagctaggcgatctagactggatccccaactcagacatgcgtcttttgtccgagactcaaactagcaacgcactgaatggcatgggccaggttccttctccttccttcgccgaggaccctagcatgctctcagaaatcgcagacattgatggatggtggacatcggaaaattacacgagaacctcaatgccaccatgaaatcattgttggatgaataattacagcattgcagagactcaatccttcgagtctgtcaaatttgtgttgcctggaagatagaacggacatcctatgatcgaatgatatacaccactccaggcatggagggcgttcacataaatgtattattatttccatctttcaaaactggggcctttatgaattctttgcatgcgcaatttcagatgtaacttcgatgctatatgcattgcaaccgattttaatctatatcctccaatgttccttggaacacattcttgaaccagtcgcccacttcctctcccgcattattatcagtactccgaatctgagataaagtaactctccgctccccaacccccttctcccgaccccaaaagcaagcccgccgcatagtagagaccatctcatcagcctgtcgagcaagaaccgtagacccatgaccaccatctctaggcttcttctttttctttggagagagagaaccagaagccaattcagcaccatcctctctctcgaacacccggacccaaggcaaagccatttccaatcgcccaatgccatccccaggtccagaccacgtatccccactgagcccataatccataccatacggcggccaacgcgaaagagcctttcggcgccgggtaacagtagcgccaataccaccggtatcgtcggaatccatatcgggacactcccaggtcgacccgtctaatgctgcgtattgatcggcggatgtcgtgccccgcgtctccttcagtacggggacgggatactccggccccgtaagatactgcgggaacgtgggcggcacatcccggcccgcagagcggaggaagaggattggcgaggcgaaggagtcgaagcagcgctctggggttgagaagaatttcgagcgggcttggaggaggggcactaggtctggcggtgctgtggtctttctccttggctggcgcttttgcgtggatgctactcttgactttggagtggtattatcgcctgcctgtgttttggggtttgtgatagtgctctcgcgcgtgcagtactcatccagaccgggccagtcgcaaattggttcaacagcggcgatggctcggatggagcgcgcttcggtcagacccagcataagagctagagagcctccgatatgtgtgccgaagatggctagttgcgctgggcggaggtgagtttggatccagtcgaatccggccagtgtatcgtggactggggttggatatttgtaagaggtgatttgggggttgcttgatcccagagtttggtcaggggcttcagattgctcttgcgagatagagctttcaactgaagatgagggaatatatgttggtatctcgccgagacgatagttgacggttactaccactgcagacgcagtggatgctaggacatgctggggtgaggccaaggagttggtatcaccagtcctttggtgatcaacttcactgatttcatgattttgaggtgcgctcgttgcatttcccagcaacaaaggtccagggggaaggtagaggattacatttgggccttctggagacagcctctggtgggcgctcggtcgcgtaattctggggatgtagttagcatatatcactagggcttataaaaatatacatgtgtactttagagaaatagccccattgtttccaagaggaagggaaattgtttcatcggtgcaatcagatgaaacggtcgaatatcgcgagcttcggaaacacgcgacggaaattcggatagctcctctgctgcgacgcagtaaaagggctataccacgggacgagtagataatacctcgcatagcactattacagcatgcacttgatgtttgataaaacttgtcaaggagggttgttggccttgctatccgaaaccaattgatgcctgaataatatggccatctccgtgctatcaaattgcttcgacgaccgcatgtctcatcttgatataattcattacaatctcagtgttatagcattctattcaggactaagctaatcatgcaaaaaagccaaattttcatcgcttgacaatttaaaatgaaacaaaaataccgtatgcaccatgctctaaataaatagatgactgatccaagagtccctccaggaatatgaattttgccgagaggcagtcgccgacgtcgccgacgccgcagggtcatctcggtcgagaggagcttcagtatcatcctctggcacagggcgcacaacctgcagactcaacatcggatccttggagtaaacccgcagtccgaccacacagacggcattccacgggtcaacagaaggctcatcatgacccaccgatggagggtggttcttcacacccgtctcgtcaggaggcatgtcgagatcgctgtcaaattcgaacccttctagtaattcaagatcaccctgatcaagagtccctgtagcaaaacgagcatctaaactggcccgcggagagtcggctctacgtcgccaatcattgtttgcgtgtcttgcgtgcaggccctggccgccgttgacgtagatgctcgggatagaaccgttgacgcggcggtcactgttttcacttgagatgcttgaaacgtcgatggcagaatcttccattggtttctctaccagaatttggctggggacataatcgcgttcgaagttgtgatcgtaggagctgccgctgggggtgcgtccgcaccttgctcgcatccgctcctgtcgggcgcttagcttttgattgcgaatccagtccttctgcatcttttccttaatctcgtctcgaagctttctccgctcagctgctttgaatcgctgctgctcccgcttttcttggtgtgtttcgcctaccagtccctttgcatgcgcgaggtcgtatgaaaggccgacttgcactagtttctctcttctcgtcgaggcaacctgacggacaatttcctcggtcgagtctgcatcttcgtggcggaaagctgtgatcttcatcaggacgtgatagtgaccgggatcaaggtcaatctcggcgttcacagatcggcccataaagtggctgctatggctgcgcacgagataatcttgttcgccttccttctgcaagcggaacttgagcacgaagctgtacttgccggctagtcctttgaaatagcgcgtatcaagctgaatctgtcagccactacacaggagctggggtaaatggcgcataacgaacctgggataggacaatgactaccggtccagtcttagtcacatccatcatgaatttagtgctgtgataatccgcggaccagggaacattcaaggtagtccattgctgggtaatggtccattcagctccgaagaggcgtgtccgatcgaagtgctggtatttcctgaggagatctttataagagatccagaagaactgggccaggtcagcgtattgagtgaaagtgcgatcgacgaacacctacaccatcattgccaaatttatggccaaggattttcatccactcgggtgtccattctttggatccatcaccccatgcaccgtgccattctttgcgaccccatgggttcctaggtgctatgagcctcttgatcatttcccttttgacattcatgcacatacctcagtcgcagtaaccggtggccgtcaatctcccgggcttccatgatggaataggagtgaccctccgcgataccctttcgatcccttggtggaccccggtaattaggatctaaccagtttgaaaataggcctgtcccacaaccaaacaggaattctgtgttgactttcataatttcctcggtccaaaagcggtccttgttcaggatattgctagataagacctcagacgtaacgcctccggtgagatcctcgatagcctcaccaacaaatccaccctcaatcgcggaatagtctccatgggcctttgcgaaggctttttctagaagaggtagccacgtctcattgtcgtcgacgcactgtgcgaagtacagggcccgcgggcccggctgcccgacccgcccggccnnnnnnnnnnnnnnnnnnnnnnnnnnnnnnnnnnnnnnnnnnnnnnnnnnnnnnnnnnnnnnnnnnnnnnnnnnnnnnnnnnnnnnnnnnnnnnnnctggggaaagacgggggcccgggagcctgtctgccagactcgccggtactcttcctccgtatcaatccgagttatgtcgtcccagatgggtcgctcctccacagactcatcatagtcagcagcgcaaagatatagtttgtcatctataatgcactgctgccactcgccgtctgatgattgaagtcagcatggttcccagtctgattgggctcggagcatacgcttacctcgatggaaaacaaatccataaatcccaacctcttgatcgcgagcaacacaaatcttctcgatgagctcctccttgttgcccatggtgcaaagcgcagccatgagccagcaatccccatcatatccctgccgcacatctgacgcggtaggtccgttaacaaagaaccgcggattttcaaaaatttcctatatgaaagtcttcagcaacctgcaatctgaacactccatggcatatcatttcgaactaacagtcactcttttcacgccccggggtctcatctgcatatttggtttatccaatccatcgagatagtgtctccggccagacttcaggtctagctcgatatcaaagtgtgggtccgaatatctctgattcatgcgctcgcattccttgacaatacggtcgacggacttttgacattcctggcgtgcctgctcgtacgacttgacagcctcgtggccctgaatacggccgctgggaacatgcttggcccgtgtccgtgcatatggattgtccggcagcaccgtatatactttgcccgggtacttggtgttgaattgttcccagaattgcttgatggattcctggggcggttgacagcgtgtacggggcggtcgactgtttgagcgcgaggagcttggtcctgctatggcatagcccatttcgtcgtcgaattccatgtcctgctgtctctgggttgttcttcgcttggttgggggttttcggttttttgggggggaggaagcacagaggtggtaattctcaggcggctatttctctcatatcgcactaatcactccgcaatgacgatcatagatgaaaatagaaacacggattctgttcttgttctaagcgctgggatgacattcccggattttcccctcacgcggccactccgaaccgagaacatcacctcagccttcattccctcgtattgatcagcttattaggcctgatcttcgtaaaagcgttcattataggctgaatgtgcattgtatcagcggacgaacgagcgaatctgacagcaaatggtgctttcggcccccacctcgattctcaggccctcttataacggccacagaaaaaataatgaactggaccagacttggtgatcttcagcgagtagagaagtgagaaatcaaggaatagaggaatagaggaactaaacccggaaaggatgcttagcatgtctcgttccaaagtttcgtggggcaatttttagctgacacgagatgactcttgacctaacccgaggctgaagaagctgaatacaatggtaccgtcacatcatttttcatatctgattacagggtagaaagggtatgtacgcctgttattcaagactaaaacacttcctatgcagtaagcccgccctatcactccccattgaacgccgaaagaggagaaagaaaccatgccccgagaacatttcccacagtgaataagatacactgaaaatgtgtgtaatcatcacactaatggaagccgttacttggaccacgtccagagtagtatgcggtgccgttacggaagtacgggtgtaagcaggcctgcttggccgatagtcggtgtgcagggtcaaactcgagcagagattccaagagctgacatccggcctcttccagcccgggaacaatctcaacgtcagggcgcttccacttggggaatgtggatttataatcggggaacgaggtcacgccgggccagatgtcttcaccgggcgtaccaaggatgctgcaattcgttaatacggttgaacacagaataacagaacaatgcttaccggaaaatcttgaagatctcgtcaatttcagagtcaccggggaagagaggcttgcgtgtacacatctcggcgaaaatggcgcccaccgaccacatatcaacacccgtggagtattgacgtccacccagcagaatctccggagaacggtaccacaatgtgacaacctgtcgattgcgttagtaaacaagcaattccattaatgcaactgaaaattcaatgcatacctcgtgagtgtaagtgcgaaggggaacaccaaacgctctggcaagaccgaaatcggccaacttcagattgccttcacggttaatcaacaagttctggggtttcaagtcacggtgcagaattcggtggctatggcagtatcgaatgccctcaacaagctgggccatgaatttcttgaccattgcgtcgcccaggcctggggttacaccccccttgaatccatcaggcaaaggcttccctcgcccaccgtcactgacaggcagagcctccatgtatttcttaaggtcgcagtcgaggaattcaaagacaaggtagagcttatggccatcggcatggacaatattcagcagctggacgatgttggggtcctgcatctccttgaggagggaaatctcgcgaattgcagtgctggggacgccctcatcttcggcttcgagtcgaatcttcttcagggcaacgatacggttggggtgattgagttcacgggccttgtagaccacaccgtaagtgcctgcagaccattgacgcgtgagttgggctgtaggtaacaaggtcaggtcggaagtacataccttcgccaatcttctcaattttctgataattatccatggtgcccgacattcgatccttcgctgctgttaatgagattaacaattggagaacagaaagaccagaatggggatttgacacaaattggagggatgttgccaagaagaatttgtaggggaagcaaggagaagaggtagctactacttactccgaggatgttggtatctgagaacagctggagcagcacgctcttcaaattccacctggggttcaaaaaagtaatttgttgacgagatgattgacaaaacacagtatttcaatggtggggagagaaagacacaaaacaaacaacccccgcgcccatcatagggcggtgaaacgcgtaccttttccttcgttgttcaactttctctttgacttcatatcttcgcaatggcccaaattaaaggtcttagtgcttatgatcgccctcctgatccagtgagactttgctacaagaaatatactaaaattgccttgtctgaggttgacaatgatccggggatcctcgacctacaagggattgattccgaccaattgcccgacggagtgacaatcgcgcagtatatgtgcagccaggatttgcgattggcatttgatgatttcattcgtggaagccatgctgaaacagaagaggatacttctttgactgaggatattccagtatacgcccataaatcgatttccggttagcattgtatcgcctcgatttagaactgacccagcaggaaaaagagcaatgcctgacctcctgataggcctcctgatgattcccgccatgttccctcctactatccagatcgaactgctctctcgcctattccaccgagacttatccaaccccgagcatcagacaaacctacacctgcactacaatgtcacgtaccccgaaaagtcggaggacacccagatgcccaagtccttcttcgcagacgatcccactcggactttccaacccaaagatcctcagcttcataagcccttgtcggttcaaagtttcttagagaaaaagctgcgctgggtaacattaggtggacaatacgactggaccgccaaattatacccatccggaaccccgccggagtttccgccggacgttgcaaaggtgctacgtgcggccttcccagaaacatcggcccaggctgccattttgaacctctactcccctggagatacactgagcgtgcaccgggacgtgagcgaggagtgtgacgtaggcttgatcagcgtgagtttcggatgcgatgggttgttcttggctagccatgatgacgggaatgggtgtgaggttattcggcttcgctcaggcgatgctgtgtacatgaacggtaaatcgcggttcgcctggcacggagtcccgaagattctgccatcgacctgtccaaaatggctagccgactggccatcctttggggagtctgttccgggaatgccgcctaccccatacgagatgtggaagggctggatgtctagcaaacggatcaacctgaacgttcgacaaatgacgaccactcaggcttccgaagagagagcagatcacgtttgaaagtggaaaattcagatgtcagtaatgtcagattctttccttggtccaaacatggacaatattctatcttaacctactcatgtacagagacagtcatgctgttccaatgagtctggtcaaacatcgcaatccaatgtccgaaagcgttgctaccattcacaagacactttgtctcccgctggagagcaattccacaaggtttttacctgcgggatatcaagcacccacccctttggacgaatcaattgcacccaaatagacattttctgctagaaaccagatcggctcgcttcattttgccagaagagtgccttactaagcatatcaaactttcaaggttcggaattgctcgaggttgctcgatatgcggaagagacctcgggagaccatactgtatctagcgcgtagtgctttatcatgtcagtaacagagaacctgggcatcaattacgatcaagatgaagcattgggctttcgtatgaatgttgaggggaaatgttattctctattaatatagagcagagggagcagagcaagccacctactgttccaagcgaatgcagagtacaaagaataacccccaggcgccttgtccgatgcttttctacaaatattatattccacgaccagtcagttcctggatgacgatgacggaggcgtctgtccagagggtgcagcaagattggataaatgaggcgtggaagatccccaagttttaccacctgcagaaggcggagcatgaccagactcggacgaaggaccagacgggtcttccgagccattcatgaggcgctgtcgcttcgccgcaggcagcccacctacctggggcatgccgctaggtagagcgccgttagacgggctgcgaggatctgcaaaagagtggggtgaagcgtagtgggtagatgaagcaggggtggaggcacccgcgacgtctgggctcaaagctgtggcagattgcaaggggcgcaagcgattcggatgagaggtggtgtcctcgcctgggcgtggaggccggacatcagggcttttctgagactgactttggtctggatcccctagctgactagggtttccgtaaccaaccccaatccggcccatgcccttatcgtgcataacaacacgtctccatttggcaaccacgctgtcgtagtcccatcgtgtcgaatcgggactgatgtggctctcttttgcgtctaattcccgtgctacctctcgtggtagggggagcgtatctggggggaacagtgcgaactcacgaggccactggcatgatccgaggcgctcgacctgcgcacgcaactgatttgcttcctgttgcactcgagcgagttgctcgtccgaggacttgcgcttctctgcctcccgtgcaaatgcacgcgtgatctccaattgccacgcatcgcgccgggtctcgtgggacagggaactccaatgattgaaggccaattctaagtgtcggaaactgatatcctcgtgctgttgtgcactccggtatatcatgttcggatccaccccgctattcccatgtcttgtgtaaggcgcagaagtggaggagtctgctgcgagttggtcggtctgccattgtgcaaccttggaacgaagggcttggcggattatatcgaggtgctcggctccggggggctgaaggggaaacgaggtagaggagggaaacggatgcgtcgcaaacaggcttggtgggggagggagcagctggagacacatggagggaaaagtctgagcttgaatgtcgaagtcgaacggagatagccggggccggatacgagagctaatgtttcgtgagcttgggggttagatacaaaatgatggaaatgagtcgacatacgtcgcagctttgatattatcaagcacctcgcgcagtgcgagctccagcgcccgcatcgtatccgggttgctggagctagcacctctactcgcatagtccggaagctgtaaagaccctgtgtgagactgcgatggcgtcattcgaggcccatccggtacgcgactagggttggggatatcgttgatcacccccgtcgcatgccaggtaggtgtgttgaacatcatgcgcaccggagcttcgcgcgacttcgatcccgagtccccagctgtaaatggctctgaggttccctttttctggcttcgttcagggctgccctcgttcttccctgttgatgttcgtgcctggcgccgggtgattccgctgcgaattcgtctgatctcttcgacgtcgtggattccgtcaggtttcttcttaaaaaggaattggtcgaggtgtcgacctaatgatgaagaggtaaatgcttgttggcagtactggcatttgcgatcctttgcagcaagactggccttcgactcgtcaccagcggtcgagccgtcgggggtttctctggagggttctatttcttccttcatggtcggggacgtagaaagatgagatgaatgaaatagatagtaagcttttcagcttataatgtcatgacatatgatatagtgcgaccagaagcagcaagctggtgtagggaaaattcaacgtggatgagagggaggtgagaaagatgaacaggaaaatgccaagcttttgggcgcggagctgcgcgagcaatttttgtgggccaaggcacatggagatttatctatgtcggacttattgatctactgatgaattgcatgtatatatcgtgtgaaaccacttcaatgctacctatgcaagtattgagatagtctctgcaatgtaactaggcccctcgaccaatagatcaagcagaatcaatgtgactgcctgggtgcatattgtacttcgaacaaatcagaatcaagaactgcaattgttatatatttgtcatgaccatagaaacttccctctaccttatcaagacacggacatcatgttggatcaatgacacacgcggatagggggaagtacaacactaagcctggagagtctagcacacgatgcactcatgcgcagcatggaagacacggtggaaccatgttcaaggacgagctttgctctttctcgtcttacgcgcactgagccagcgtttcacgtcgctgataccgtgcaaatacaaccaggagaagatgaaaacaacagcaaagttgaagataatgaatccccagatgatcccctaatggatgttagattaatctggcactctgaaggttagttaaaggggtatagatcacgatactcacataatctctccatttgtgcgagtaaaaaacattgaggctactagcctgaaaaatgtaacaaagttctagttagctatgctccaagtctgctggtcaagacattcagaagcgaaacttacaaaattatcaccgactgagtattgacagaatgagcacattccattcccaatgtctcggacatatccaccggatttttcggcataagacccagcatattcttggcagttcatgccaggtggagtgctaaagcgggattcttcgcgctcaatacaccgcacggggacattatgggtgatggctccaacaaatccctcaagcagatagtggaaaggcgtaagccagtacatccacgcttgccaaaaatgcggtattgcgacataagggacgacaacgccgcagaaggaagcaacaaaggtaaagaaagttggcacgagcaaacttgcaaatagcacatttggtgcaattgcagctatgaattgaccaaggccgatataatatagttcaaaaagcatcatcgacatccaaacgtagccggaggtaaacgagtcgcgcgggaaccaagttccccagtaccttttatatttctgtcagaggggagagatgaaatgccttctcaatagacacttaccagcagttgaagtaaatggacccggcaacaaccgagtatggcagttctgggatgattgtgctcgtcacaaaggcagcccaagagtagatctttgagttagcctctcgagattcataaaggcctcgaaaatgaatatatcgtggttggagttgctgtatcagcggtggggctatcgtcaaggtcatgaaaacagagaaaagtcgtgattgcatgtcgataaagctatttcccaaatgccagaatgtgaaggtgttgaaaaggccggtaaagatgtggagcatgaatttaccctagttggcaattaggcaagtcattcgggcttgttttttgagacctagtgacttacaaggatgtagtctgggatcctccagtaagccacgaatgcgcgcttagtgactgcgactgtttgaacatagagaggcatcgcgtattcgcgatcgtcgtcaaccttctggtcattttgagcgttgcgacgagaggcgattataccttcaaggtccccagaaagctgtttggattctggcgagttggcccatacattaccccagtcctgtcccttataatcgggatttccggctccaatgacttccaacatatactagatcgaatatcagtgagaaccaatacatccagctttataatacacacctctgccggattttcatgtggtgagcaattcctcccgccgttttgttcaaagtaatcaatcagcgtcttggagtcgtttccaaggggcccattataaacaacaattccaccgcttttcagtagcaagagctcatcgaagttctcgaataagacagcagaaggttgatgtattgtgcagagaatggcctgaccggcatctgcgagtcggcgaaggaagcgtacaatgttgaacgcggccagagaatcgaggcctgacgtgggttcatctaggaatagcaaaagctctggtttacttgctagttcaactgcaattgtgagtcgtttgcgctgctcttggttgaggcctgagcccatggatccaacaattgccccggcgatggaacgcatttctaataagtcaatgattgtctcacaataatcatacttttcttttaatgggacttctttcggctgccgcaacagagcggagaaccgaagagactcccgcacagtagcagtgggttcgtgaatgtccatctgctcggcgaatcccgtggctctctgaaagctccttgggagaggcctgaaaatattaatattcattctcaatgaaatactcaaagatatcctacctcccatcaactaagaagttgccggtgaccacgccaaaattgatgcgctgtgctagcgcattgagcaaggtggttttgctagtcagacattagcatcaagaatgaagtcaaccttgttacgtgcttaccccgagccagaagcacccatcaatgcagtcagccgaccaggcttgacataccctttaacattttgcaaaagttgtctctgtccacccttgtatggaatggtgtagtcaacgtcttgccatgtaaagattgccgtgtttgtagcaatatcccggactttttcatgaggtacactcgtgtcgccgttgttttcgttggatgctgcgccatccgcctctgtggattcctcatcttttcgggggccggattgcttgatgacatcttgaactgcttggggggcttcacttcttttgaacaccgtgaccgagctgccgcccttattaggtctctgtaattccattcccaacattgtcaagcagacgaaaaagataagccatcctgtaatgatgccgaaattccgccacaggtgagccctggagtaagtgtacgccgtttggatatacttgggaccatgaacgatcaactggtctatatcactgccttgtattgcacatgactggtgaccaggcacagcatttggcccatcaggcacaatgtagggcgtttcacatttgatctggagattgtggaactcgttggccatcaatgcctcgaatgcgtattggacagggttgatccaaatgagccactttaaccatgggtgcattttccacggtgggatgagatagcctgaattttgttggccattaaactcgaatattaggttccattctgctgggctcacctgtgtacacaaccaatgcctgtatggcgacaccagtgaggcgggtggctatatagtgttattgaagacttcttgattccgagaggtttgttccactcaccaacatccaatgaggcacatagagcccccagggcacgaaagaaggagtacatagtcattgtgagaatgaaaatgaaaagcagatttataaagaactgtgagggtgttcgagcaagatttgccatgctaaatccatcatcagtttgatccacgtaaagaatccaatgagactcacaagtatactatgatatcaaatagaacgacttgtatgaacacgagaggcacatcaaccacaacctgggcaagcgcatatgctgctggccggtagaaagagctagaaaagattagtcccatcattttgtctttttttttatagtcctcacaagcttttgtgtttcatcaaaattggtcggctcccaaatgctgctgtcagctctgccatagcaagcaatgaattgaaaagcagtataaggaacatcacaccacccctagtaaaaacgccagaacttgaaacggtgagccatatggagtctcttcgcatttggagaggcaattgcttaccttgtatcgggaaggttgtaaaatagactaccaataatgagagcttgaaaggttatcatactccactttccaatcaacgaatctctatcaccaatcattaccagaaattgacgatgtgtgagaatcataacttgtttgtagaatgagatggtgaagttttttcgtttggcctcacttcttgcagcctctctctcctgcctttggctttcgatatcgccctcaaagcttttcatatccgctaggttgctttggtaagtatcacttttgcgatatgcagcttgaaattcagctgcattccgaggaattcggtcgtcccagccatctttgacacgccgcgcataggggtcattgacagaagtcaaaaagtcgggagttgtccaacgcggggggcattcaaagcccagtccttcgaaataggcctttgcgtcctgggtagggccgaagaaagagcattttccctcttcgattaagatcaccttgtcaaaaaggtcaaataaattctccgatgcctggtagagagctactatcgttgaaacgttggcggtatttgttagacttcgcaagctttgaacatactctagcgctgtactggcgtccaaacccttggtagagttgtcccagcactgggtactagcctttgtaaccatagcttccgcaattgaggttcgtttcttctcacccccagaaactccacgaatgagttcgttcccaactttggttcccagagcatgttcaatccagaacaacttagctatggcggtcaagaatgtctgctggtattcctttcggctttctcctggtattcttgaggctttgtcgggggttcgagctttcaaggcaaaaagcagtgtatctcgcacagtcaaagttgcataatggagatcatcctcagggttgtacaagactgatagttttagttcggaatcatggtcacacagacaaggacacaccttctgacctatactcctttgccattttttcagagtctgtgccgccataccgcacatcgccttcaatgctttcgtagcccgctcgttgattgccaagcattttcaagaaagtggaacagccagagccagggcggcccagaacaagaagcatctcccccggacgaacacaacccttgatatgagatcagtcgggcatatctctaggggtgagaaatatactcacattgaaatcatctaagatagttcgtatcgctgcttttttggccccggcaccttttctgccccgagtgagtagttgcttgatgagccgtggtaagccgagaaaaatatccccgttggtgggttgtagagcagctccgaggccgacaccttttacagtgaggttcttccatagaactccaacatgacgtgttttctcttcttcggaatttgctttgcgctcagggccgaacatccgtgagatcagtctttctatctgggcccattcctctccctgaggatcatgaccggaggctttgtgtcgagatttagtacgtgcgaggccatcgtcagttttctttggcgccgtggaatctgcctgggtgtctgatgaggcagtgcgggttggcgtgtaagcttcggatggagacgaactggctcgcgaagatgaaccctcagaggaagaaacggaattttcaggaatgtgttctgggtttgtagatgatgcggactcgctttccatagaatggtcgtttgccatggtcgttttttgagactgagcccaggccttttgaggtatgcgattatgagacaacgtgatatcggatgactatatatgtagctgagcgcaacacgtcggttagcgacgataagtataaacagaatcactccgcatggatatcatgaatgtcaagaaaatggaaaggggtgtaggtattacgtcaagtatcattgcgaaaagggaactcggggtgtcggaacaggaacgaaccgcaatattatccagagcgtctcttatttgcttgattttgtagactgtaaacgagtacatgtgtcatgtgtagtgaggtcatcgcgtccggttctattatatcgtgcgattctttctttctgagcctaccaaccataaacttactaaatgtgaacaattaatttcaaacattttctactaagttctaggaggtcgtatcgacgtacgatgcatttaaatcccccgcagtttgagttgtctccgatcatgaagtcatcgatcgtacaatatggacatggatgtcatggagtcatcttgaatgccattagttctgcgcttttgatccttattctttggctgctggttttaattagtgtattttctcatatctaataaatataatcgccctggttgtttcccactgaacaagcttcgccgatttgtattcattactttttttgggggttaccattgctcttgtcctaagtatctcaaatccatattgttcatgtagttctaaatagattgcattaagaagaagagttgatggggcctaatgcctaggcaatcatatctaggcgtgtcagtatcagctgctttcgacccacgaaggttgaccgcttcgattctttgattctcaggctgatctttcaaattatatagcttttattttggaatgaagcacctcgtgcccggaaacataatgagcagtgctgtcagcattaccttcctacctatctaggaatataaacatctacggaattgattaccgacaacatttaccaactcgttttactacagcacaagagaaccctatttgtgttagtctaccaaacaggtgtgacgagagtaactctacaatcatgatctcgtcattctaggacaggttagtcaagcatatcagacaaatcttgactgcatttatcaatgcaaaagctagatagagcagcacgccatgattacagcatattactctccggttcagtagtgataaatctctagattccactctaggagcagggaagatgtatctctcaccctagaaaccattccggcttcttctgcggtgttcttgtgcagctttggtagcaatgaagccccatcgcgctcacagatttctcccaaaggtgttggactttttccatttatccactccctcatcaaagggtgcagtcaaagcccgcagcaagtatgtctccagccttttcgtggtattgcttgccaaaaattaatggcaggttcagtgctaagctgtggtgtgttgctaccaccacacctcctcttcacagcatctccgctagccgaggatgtgaccagactgaagtgaatggtcaagttgatgatcctcctcaatattccttcgacggcgcagttcttgaaaagccaatctcgactcgcagccaactggagggtcgaattgtgaaactctggaagaaagtctggctaggcctttatcagatcgatgataacgaggatcgataccatgtcgaacgactggaagcactttctctcggggccggcttgactcgcacataccgagttggcgagcttcaagttctcaggcgtcattttcttcgaagcgagaccaacaatggaattgcttcgttgaagcttttccggggtctatcactttcgacccttctatccgtgatccatattctggaggcttatgaaagtgaaattgagaacttgaggctgctctattccatcttgcgaaggggtcagctttcactgcatgagactgctgatcttgctcaaactgctgttgtcagaactgagtatatggcaattgcggagccgatggagaagcggatcagacagtatgatattcgaatgaatgtggtaaatatggatatctgcgatgaggcaatgggtttctatgagcgacaaaagggggaatatatttaccacaaggcattcccgaatgcgtggtaaatacggggagtttttggttccatcctgtcccgtttcacattgactaaactagtattggaggactttgagtacaatcagtataatttggatcaaatattaatgttataacttcaaggacgtttgaataaaaattatactccgtactcatgatgttattagacatggtattcacaagttgtcttaaattcgaggggcccccctttttttggctaatgcgaccctggactcagcttaccgccagccacaccgccctggtgtcgaactccctagcaagacagaattaaattgatgccttatatgtaaggtttgatatggcagaatctggcagaggggggtcccattaaaccaaaggggggggtcgaattagcaattagggtccttataacagtcccaaaattcttatagtacatacttccaaccttcttgcaaatatctcctcggggccccttgatccctcaaatgccgcattatagagaacaagttgcaattgcagcctgaaacctgggtgtgcacaggtgctatactaatccaggtacctacagggcttgagaatcaattcaatccatcttccacatcaccttcagttgtttaatagcatccccgtacatcctttcacgcacctgattccccttccagaaagagggctttttatcaaatccgtgaacagcatcctcaatcacaaacccgcctatactcgccatcttcccgtcttcaacgaacccaccaagtctttcccggaacgtatttccttcaacaagcaattgatcccacccacaagtatagattgccacagcaggcggatacgccgcatgcaacagagatgcaggtgccagaccaggcgaaagataaggatgcgacatatccacccggcccgtccccggccgtatcggtaaacccgcagcgagaagataggaatcgtcgaagaacttgaataaagaaggagaaatcatggatttttgtggggcgataggatttgtagcgtcacgctctttccgcgttcgtgtccagtcggtgccggcgtagaatactaccaaaccagccaacgctacctccccgcgtatcgacgcccagcgctttttctgtagttcatcgtgcagtctgaatggcattgctagagcgaggttcccgcctgcgctggctccgctgagcacgaagcgcgttttgtcaagattgtacttctttgcttcttgccatagccatagtatagcaccgacgccgtcctctaatgcgacggggaagggttgctccggggctagacggtaattaacgcttattaccacagcatctgggtaggcatttaccacggtaccggcccagcgggcatcatcacgagcatggccgatggagaagcctccgccgtggaagttgatgaggacgggacggggtgggcatggcttggtttgcttgcgaggatagagggggtttgagggtgcggtgaagaagtagagttggattgatcccggggctttgctgactgtggacggaatagcaattccgacgcttggtcctgggggaagtggccacgaaaggtatcggtctagtatggagagtaggtgggcgagcatgcgatatcggtgtgccttgttcctaagggcggagcgggacggggagggtgatatggatgccatattgtactgcaatgaaatgtttttgtacaaacgggcgaacaattgatgatagttatgtggtgttatatagatgaatgatgtaacttgttagtcactggacctgaatgatgcctgtcagatgttagtcaacatatcaaggaggatcttgtgtattatacgatttgagcgttgatattagaagcgaactgttgcagtaaagtgctaatattctaatggtggttgaggctgttttgtctccattcccgagtcgcatatagtaggtcggactccaagcttccagataaagagaagaatgcctggtcgtttataggtttcttaattcgaatttctatcccattagaaaagagatacggatcaatttacccattcttcacatctccaaattttctggtctgtgccctagacgccgggatcggcaagccgagcccgaatttgaaggtttgcacggagtactccggagagcatatgttgtacattatttcgacgtagttcgcgttatctcagagcagactacggagcagttaacctatttcatcggaaacctctccgaagcgtaatcggaaattccccacctcctcgtaggccgggatccctatcccccacgtcaacgacgtcggcacgaaagactacagccagcctgtgcatcatctccggtcgatatttgacttggaggatatagggcacgagaattctgctaaggtgctgaggggacactgtattcaagtcaacccttgtgttttaaactcggtatatccaacatttcagcgaattttctgttccttcaattttgagaccgggggggggggggggaatccgcagctcgacatcctacaaagcgtatcttgtactgggaatccaacgttcttaccagcgcgtttcgacagtgttgaaccatggatagtcagatgcattcgagttcggttgaaattaaatcgagatgggacaacaagtactgcagatatatatttcaccttagatggtctctcaccttgccaaacacaaagtacaacatatatagcgatggacgcaaacgtaggtgcgctggagtgaatcttggtattacacgaatggatctcctgcaactcggagagataacaatagctaaaatagtgtatacaatgcctgcctcgatcaccaacaccccatttgcaccttcccccacggtcatttgtcattgttttttttttcttttctccggatagctttgtaagactactcctcattcgatcaataccatgggtagaaaagatgcgtatgcatgtcaggtttgagatactataggctactcggagacggaccaacggaataaagagtacatcagcatataccggagccaacggtctcatctaccaaacatccaacctgttcttccacttgaccccttataagatggtatcctagtacagcgtttgaatgcacagtgtctacccaatcatgcatatagtgatatttactttcctaattcactatcatcggcatcaattgccaacgctggtggcgactttgaaaaatgcactaggacgtggcatctgttagtccacagtcaacgtagttacatcatttgatggcaatcgccgagtgaggtcacggcctaatcatctgcacctctaactggtagctcattaaactataccccgcatccgcagttcgagctaggacgagaccacgcgacaatttccccagataaaaagccaagacgccaagaagtgcatcgccagcgagatgtggaaattttagagcgatactgcccaatgccacaggtcatgggagcaggaagactcgggcgtataattttgcatgtttatcttatattgtacaacaacacgggtgaatttatttttgcagtactccgtacgatgaagtactccgtaataatctcaataatgacgtgcagccgctggagtcaatctcggggaaaataggaggacaaatcgatctttgtcccccttcaactcggcccaggccgttttcaaaccgtcggcgctggttgggcagatattttagataggtagactcgaatgaaagacaagaaccgtatcactacgggtaatttaggaagctaagtttcagaaatgattggctgtgattgatataaaggaccgagaatctactaattaccttagtgactgttgatccgggtaacggacataaagaagaaaatgcgacgggtgtggacgaaaaggggcaaagggcaattcccggaatgtgtgaatagattcaataattgaagatcacggggcaagcttagctttcaccatggctatactccgtacatattccgttttgcggaggattacagggggaaccccctttctccaccagcccttactccttcagggcgtgaacaaaaaagccgcagaacaaaaaaagcctcaaattcgatacatagttccagccagctggtattcgtgtcacacgcaaggcaggaaaaatgaaaatgatcagcagagttaaaaaaagcgaagacacttagtacgtaagtgaaacaaatcgcgcaaaaaaataactaattgtttcacaaagaatgggctccgggtagaatttgacaaaaaagaaaaagaaaaagctcgcgttcccgacgccgtagccggttcgggatccgccactaacggggagaaggatctggggttgtatcgcagaaatgcacatcccgaggcgacggcgacggtggccgataaaaacccatacattcatagcagaccgctcatgtgcgatattaattaggaatcattcttcataggctgtggtccaggccatcgccttcggcgttggaacgtaatatgcatggggttctgcctttggggcttggatctggagtaactgctcggagcctggctttgatctcattgcaccactataacgagcgattatcgtcgcccagcgaaaaccagtgaaaatagggctaggacccagcggcaatatcttctacccacccgatcatcctaggaggtagaaatataagcgctctgattggtccccaccgccgcgatcaatggatgcatgtggcatcatcctcggctggttaaacgccgttatttgctgctgagtcctgctcccagacaatcgttccgagtttgtagccgagcctattgccatccgggggtgacagggtgagtttcattttgttttcctttccacgggcaacacattccgatatcaattcgggttgatgcgagccgaaaacagaagagatgggggatcgtgaagggttaaggttgatcgacgagattatgtcagctccccgcgattctgagtgggctagactaggaaattcttagacgtatatcgattgggtgaagtcattatgcgtcattcctgtcgtccgtggctgaagaattcctagatttggagaggcacttttggtaaactcttttttacgaggttttaggaactaatgctcagatgattgacgaaatgcaaagttcgcccacgtagactggggtgtttgccgcaagcgtcagagcagcataaaagggcccctaaactggtctcatgcacctctccttgtaaactactcaggaaaaaaaaatccattgagttatttttgattctagaacttctatctggttcccactagtattcgccttcccggtcatagatccccttgttccgaatcaagttcgtgctcatttgaataactcgggtcaagtcggactgcgcctccaggtctttgcaacccacggcagcacttcatccccatccatcaagcgtgttcctcagctcggcgttcagccccgacatcacccgtggaactgtggagaaacactacggaaagtgcacgagaaccctccttcataccaagaccgatcgtgaccatggcctctctcggaaaggattatatacccctcgaccgctccaattctcctggtcctctggcatcagatttctctcaacaacaagtcgctaaacaacgcaacaataactaccactctacttcactcagaaatatggttgccacatctgtgaatcgcactgccttgcaccccggcggtgttcagtatgttaccttcctatctcactgtccatacctcatcgtcgctaactgtcttcacttaggcctagcaagggtcacaccgagcttgaggaggagcttcacgagactgctcacattgactacgaccgtgtctccattgtaagacctcaccacccttgcgctagacatttgattacaatgtccatgccgtctatcttgcttcatctactaacatcatttagattgctaacccctctgttcctgccctttacgaagatgctcttgtctacgagactggtactgctgttacctccagcggtgctttgagcgcatactccggtgctaagactggtcgttccccctccgacaagcgtgtcgtccaggaggcttcctcagaaagcgatatctggtggggacccgtaaataagcccatgacactggatgtgagtaaactttttgattcttgatgcgtgattacactggatatgtcattgtcctcattggagcacacccttgcagatgggcccgaggagatccacttggatcccttgcatatgcaccgggaggtcaagcttttcggcaagactctgtgcaaccttttgggttgcggtctctgccggataatccctcattgcctttccatcatcatcccagggaatatttccttcccccagtttcattgcccattacttgcccccctcgatttgcccctcggctttcatttgcggctccgcaatccccgcccttggcccgatgacatcacgtgaatgacgtcaacaataagaatggtgactaatagattccccacaggtctggcgtatcaaccgtgagcgtgctgtcgactacctgaacacccgtaaccgcatctatgttatcgatggttacgccggctgggacaaacgctaccagatcagcgttcgcgttgtctgcgctcgcgcctaccacgctctcttcatgcgcaacatgctgattcgccccagccgcgaggagctcgagcacttccaccccgactatgttatctacaatgctggctctttccctgccaaccgcttcactgagggtatgacctctgccacatccgtggccatcaactttgccgataaggagatggttatccttggtaccgagtacgctggtgagatgaagaagggtgtcttcaccgttctctactacgagatgcccgtcaagcacaacgtccttactcttcactcctctgccaaccagggtccggatggtgatgttaccgtcttcttcggtctgtctggtactggcaagaccaccttgtccgctgatactaagcgccagctgatcggtgacgacgagcactgctggactgacaccggtgtcttcaacattgagggtggttgctacgccaagtgcattggtctctccgccgagaaggagcccgatattttcaacgccatccgcttcggctccgttcttgagaacaccgttttcgaccccgtctcccgcgttgttgactacgatgatgccacccttaccgagaacacccgttgcgcctaccctattgagtacatcgacaacgccaagattccctgtgtcagcgacaaccaccccagcaacatcattctgctcacctgtgatgcccgcggtgtcctgcctcccatttccaagctcaccccggagcagaccatgttccacttcatctccggttacacctccaagatggctggtactgaggatggtgtcactgagccccaggctaccttctcttcttgcttcgctcagcccttcttggctcttcaccccatgcgctacgctcacatgttggccgagaagattaagcagcacaaggttaacgcctggctcctgaacaccggttgggttggcgctggcgccaccactggcggcaagcgttgccctctcaagtacactcgtgccattctggattccatccacagcggcgagctggccaaggctgagtacgagaactacgctaccttcaacctgcccgtgcctacttcctgcgccggtgtccccagcgagctccttaaccctgagaagagctggaccgcctccacttccttcaaggatgaggtcaccaaacttgctgtcctcttcaacgagaacttccagaagtactctgatgaggccacccccgatgtcctcgccgccgcccctcaagtttagagggttggagcgatggttaagaatttctttttctccttgtttcttgttcttccaaacaggatgaataagtcatttgcatggcgtgctgctttattttgatgatgctctttggtcgccgacgtctgccgcttgtatcgggacaagcggatggatctttattgatttccccccgatttgggttgtgctttttattattttttgccatctatctttgactggctgggagttatgtagtgatattaatgaaacaatttattacatcatagtcaccgcaatggatcatacctcatttctaaacttattctcaactaatatgtttttgtattccaatggctgcttcttgtagcatccatggtggtattgtttgatgatccctggttgacagtgcgctgccattaaaccctcgtcaacgacgccttggatctatttgcacctacctggttatttcggtcagccatttcatgattttacgatgttcggttagacgcgttcgcaaggcggacttaacaaatatagtcagttgggtgatatcatcggaaaattactacagtttgagtcttccgctaaggcatttggggaggatatattgaatgacttttggctcaagcatagaaagtgaggtcatcgccttcttcactagtagactccagctggacctaggaacctcgtcttatgtacggttggcctaacccaaagaccaatagtcctttctgaattctgaactctgaacgatagaatgtttgatttgatgtatttctctatgaatgcttatcttgcttgccgcgaagctatcgacagcgcaagtgacttttgggcgaaatcatccctatcctttggtagacggggttagcatgcgaagccccgtattgatgatggatacaactcaggtgaaacggcgaaggcatggaaaagccaacattccgacgggatgcattagccgtcatgatgctagctgatgaaaaagtggagtagggtggttgaggctcgtcgatgcagttaggatcacggtacattgggtcttttcggattgtacggtattcgatgtggtggtccttggcccacgaggactttttctttgaatactctagagaaataagagcagagtcagctttaagaaaagacctaggttgtaccaagactgaaggtacctttctagattgaacgcaaaatgcaatgtaggtgataacgggtatgagaggtatgcttttgaagaaagaagagacggggagctgagtcaacaccaacattcgaaaaactgtttgtcgctatgcatatcttgcccgcccaaacagaccatcgttgggggtaaaagaagtagttgtgaatccaaacgggcttgtagtatttaaggtattctcaggtttggcaacttttttttgcgctcgactttcggcgtctttccgttgatattccctgttgatggcatccttggaggaaaggagttgagagagtgtcgaagctaggtcactcataaagtccccagtgtcttcttggaagtcggcaaaatcgttcctaaatttctcatgggacgcggcaataaaatcgcataaatctttgcgagcaagatcgctcgataggagcgtgctgccgtagataatccgaatcgtatctgccagagaaccactcgttgcgtagggcgaactcccatactctttcagaaaaggtccaaaagcatccttcattaggacacgagcataatcttgtaggtccataacaagataacgctgggcgaatgagtagaccttcgcgtgtagaactatagcatcccccgtatagcttcgagaagtcggtgaggagctggatgtagcatctaaaagcacttaataggttaatagtagagttattgcagatcaggtagactcactgtgttcagtagatgattttgttggttcttgtagtactgattttttcttgcttggatgcagttcccatggggtagtatatttctgggaatagcaaaattccagaacacaactgatagtttcttcatcgaaatcggaccagtccaataagtcttgtccggcaaacttccatggtccagtcaccctagcggttaaggcagatttgccttggatcagagcaccggggtggacatagaaagtggttttgcgttcccctacagcagcctttaacgggctttccatgtaaatgcttttcggccattagcacttgaacgaggaaaagaaagaaatgggtttcgtccagtacctatggaccagtgtctcttcgactgagctcatgatggatgggatgtagagttgcaacaaagacagaggacttgagatggccggtgtcagaatgaataggaaggaggggagggggagaatgtcatgagaaatgaagtttaaatgaaaatcaggcttgagtgggaagactccgcagcaaactcgtgatgagcccaataatacgaccgcaaggaatgatagaaatattacgattggtctcacaactatatcatctttcgatgccccccaacacgccttgtcttcagcccagctccagaaaccagttctgactttgtctgtcgctgctgcgcatttcctaaaagagcttggattaccggtctggtgatgtcaataccatcagattctcactaataatctatcacgtaagaattacatgaaaggatagcgctcatagaagttagcaaggtcaattcttagtatggtcaggagtgtaaaaggaagctatacgccgtgaaagacagcttgttggctctatttatatgcattgaaggctatatcgcctacactcaaacccgactaagcccgatccgtgcttgttaactttgtaaatcgcgtacaatttcatatgggtttagttggtgtaaatcttgtagtaagactcgctaaggctctctttgatttttatcttttctataactaagcaagtgaatctagcaaagtaatacaactcgtaaatgtttacagcctaagtaggtacatactgactacaagtaggtaccaatcaagagtgatgcaaatcaaacggaaggaatcaagcagatgtgatcgcgggccccgaagctcagaaagatcttgcgtgtggcaattgctaccaaggcgagagaaagaaaggtatccctaatattgagatatcaaggcactcgtccaccactaaagaagaaacgattctgctgtttactcggcagctggtagtaacatcttctccactcagcaaggtaaccgtctttcttctcacatgtcttttgcaggtcagccttggaggactgaaggagagtaagctgagccaaaagttcgcaagctagttcagtcataaagtcctcagtttgtttttgaaattggggaaggtaatgagcgaactcctcgtgtgatgaggcaataaagctgcgaagcgcaatgcgagcagcatcaatgttagtatctgacgagagcgtgcagctatagatgatccgaaccgcctccactagagagagacttgttgcttggggtgaagagctgtattcttctagacaaggcttgaagcagtccttcatctgagtcagggcaaaactttgtagctcatcgatgagataatgctgggcgaatgagtagaccttagcatgtagcactatagcatcccctgtgtagcttcgggtggcaagtggggaaccagactcagtatctaggtgaaaagaagcactaagtaagctgagctcctgggccttcaaactctaatcaacttaccttcctgagcgtctagttcagtcaacactagctctggctctggattccccgtgttcatagccgactgccgtgggacatcgtattgccggccatgaaagaatctcagaacgcaatcaatggtttcttcatcaaaataagaccagtccaatgtttcctctccggcgttcttccatggcccagtcaccctggcagtcaaggcagatttgccctgtatcaaagcaccgggctggaaatggaaaatggttttgtttttgccaacaacggccttgattgggtcttgcatgaatatacttttcacttatcagtaatagaatagcagtggaaatgagatatggcggtacctttcaaacttggttccttctaccgagcctatgatgaatgccactcggattttcttcagttagatatgcttgtggttgacagagaaagccaggggaacgaagagggtccttgtagataataaggaagaggaggcgctaatggaaccatgatagaaagatgaccgtgacaaccacatggcaaatatatatcaactatacgattgatgcacccatggaacctgacaaaatgatgatgtttggatgcatggctgctataatgcgcgtcctttgtcaggtcagtttcacgttagtttgaccttgctttgtgtatgatcctcgcccccaactagataagtgaccaaagacacctgaaagattcaaataaaaaggaactggataaagatgccaaagggtcagaggtcaggggtcaaagagaggtacgtagaacttgtgaatagaaaaagaaaacctcaatcccgctcctacaactaggcccgggctcctcaattcgatatccgtccagaaaagccgtacgaggaacgttcccgaactcctatgccggtaggccgtgggtccaaatataggcttgaggctagtggggttcccgacgtgccgagaaccctttccacggaatgaattgggagtgatgatgcgcttttagggtcgagctaggcacggagtggattccgcggaagacacacctacatttctagaatcggaagggttagaataatagcgctggtcgacgttgtttacaaggaagtgacggagtttgttgtgtatggcggtttccgagactgtgatttcttttttgtcgtagaataatgcagatagctgaatatgttcattgacatggagaggtccgtggctaagcgcatgaattgtttggcggcatttcatctccgttgtcaggacttaatttaaaccggacctcggactctgagagatgcaacgattgaaacatggggcgggtcgtaggtcgtacattattaccgaatgatgagatccgatactaggtgtcttttgcgcactcacggttagcttagtctcccttcgcttcgcgaacctttcaaccctgccaattcgaatagaaaaaaagcgccgtctattttccgtgccatattgccatattgagaacgagtatccatgcgtgtgcattgttcgggaaacagacctccgctgactctgaccgacttgctcggtccttttgaaacgacgttgaaagttgacgacttatatccgtaatcgtcacaaaggaccaataccatgaagcagatgcaacacagagacggtgtgagaatccaccccagaagcttactgtcatatttattgccggtaatcggcggaaaagagccagagacaggtcaaaccggaggaatctgtgatgactggctctgtcaacgcgacaataagtagcgggagccgcaggtccacacagggaaaagggggatcatttaggatctcaatggatgagattggtcggcggccaggggcaggttgcaaggacggggcccaccacagcgtcagcgaaatgatggtcggccgattggactgccgaacatagtcggatcatggcccgagggtagcggcaaaaaattaatgaggtggaatagccggtcagattggattctagacactgggactttgccagggccctcgataataaaaaccgagtccgatatacggctaatccgtgcgtattgagtccaatgttcgtagagttgatcccgggagattgtactgggaataacgtgcggcctgcgtttttgaacagggtatataccggacattagcagaatgtgtaggtataagtaattcgatccccgagatatgcccggagaggttgtctaagcggtgtcgggtctatctgtatggacgggatcccgataagttctcgtggggaatccaaaagcggcttagcgttggtggggattccggatttagctcgtactcgtactaatatatatctgcctcgttgatgtggttgtagggcttcgagggggatgaatggaatattgacagtctgttctatgttgggacaatattggacacggctctggaatattttatacctcccttcacatagatataggtagtagatggcacgtttggcgaattcaggatcgtccatcgaccccccgcattttgacaagctccatagcatgtccacattcgtgcatggttaatcgaaatcatgtagatatcattggtccaacacgcaaatccttgtgtggagaggcctggttctggcgactttcgctccatacggtccaacaaatgccagactttatttccgtctattgtctctcatcccatacatcctgagcggggaatccgcggatagccatcggttgagcgtcggttgaggggtcggttgaagggcaataacctccggttcggaacgagtttgcggctgtgtagattgacttggacatttgagcatattagaacaagcgcaggcccccattgtcccggtttgaccttgtatagttgtaccagagtactcgactctacacgacataaccaccccgcaccttctctgtcttgtgacttttcttgtgtctcccctcatattctcccttggcctctgttctctgttctttgctttcaaatattgaccctgtcgacacctcctgtcctgaatctcatataaaagcaacactacgtcatcggtaagtaccatggtccaagatcgtggacagtccccgtggcttccaaatccaccaaagaggatcctgctagtctcctgcaaagggcatctcccgtgcttcttgacattctcctatacatcgtgcattgtattgacctgcatctacagtaggacctgaatacttcactatggcatccactctcaaggatagggccgccaaccatgctgctgcttctgcggaaaatggcactgagcccgaagctcctcccgacctcctgcaccagccgtacgtccgcgccgtcctgcccttcatcaacggcggactgtccggtatgaccgccaccgccgtgattcagcccgtcgatatggtcaaagtgcgcctgcagctcgctggcgaaggagcccgcactggtcctcgcccatccgccctcggcatcactcgcgaaatcattgcctccgggagagtcctcgatctctatactggtttgtccgccggtatcctccgccaagccgtctacactactgcacgcctgggattcttcgaaacatttatcaagaagctcaatgcccgcgccaaagccgcagaccggaacgtaaccttcgtcgagcgtgctgcggcaggactgacggccggtggagttgcagccatgattggaaacccggccgacctgtccctcgtgcgcatgcagtccgacggtctcaaggcccccgaggctcgtgctaactaccgttccgtctttgatgccctcgctcgtatcacccgcaccgaaggaatcggtgctttgtgggctggtgcttctcctacggttgtccgtgctatggccctcaacatgggacaattgactttcttcgccgaggctaagcagcagcttaagcagcatacttccctctctgctcagaatcaaacttttgctgcttccggaattgctggcttctttgctagtttcttgtctctgcctttcgatttcatcaagacccgtctccagaagcaacagaaggaccccaagactggcttggttccttacaagggcatggtggattgtgcgcgcaaggttgccaaggaagagggttggttgcgtttctaccgtggcttcggaacatactatatccggattgctcctcatgcgtcagtcccccactattttaccccaactttcccccccactgactcgatctacagaatggttaccctcatcgtggctgattatctcaacctcctcaccaagtaaacttgctttgaaagcctggattatcggtcttcgttcttttacattgctctccgattacacgatatcgcatcgacacgctcagttatgcgatttaatactctcagcacgccacagggtctattgatagacccaatctgctatttttaatatccatgggaagcgcagcgtccgggggaagacagccaattcaactccgagacactttatactccgtttggccgatgtgcatcgcacaaacctataatggcaaatcacccatggtagatgtggttcgacattcggaaaacatggtaccggcgaagggctattgccacatacaatttatttttctttgggaagagaaaatgtcggaggatacgcggccggccggtcttctccgcggaaagccacgacaacagaatgcaaaacatagtcttttgtcacccccttgctcgttttcttgttggtcggcttttgttgtgtttcgacaagcgaataccctcttgtcttgctctgttctttgcctctatacctctaccatactttatgttggtcttggtctgctttagatatgtagttaggtagtatcctcagcggatatagtgtttacttgcctatttctctcgttccattttctccgatagtaaaacattccaagatctctttgtcctagatatggagtagtatgtgagcctttgcactgactttgagcattcgaactttcgagtttccggtgatgactatcatattttctaaattattgtagttaagaacaggtaagttgtcccattgtgtatgtgaatgtattccatcctaacgccgaagcagaaggcaggtcctacagaataaaagcaaacaagagatagacatcccatcgtgaaagtgaaactattcaccattaaaaccgacatcgtaaaaacagaggcccaaaatgcaccactggcagtaggcaagccagatggccgtggggaatcacaagggtacaacgtgaaaaggaataaaacagaagatttgttcaaggtccaaacctgagactcgggaccagatccaacacagcccgtcgttaaaaaaaataaaaagagaaaagatcgcatccagtccacttctcttccgagtccatattagttccgattagatcttctcctcgccaacacgctttgactcaacagcgccaagcggcagcacgtcctcaagtgtctcgtcagttccctgaatatcatcctccacgggaaccgagtccttgatcttgaaaaagacaacagggacagcaatgaggatcgacccgcacagaagaccgaagttcgaggcatattcgttcatatacggcagcttcttctcgtccaacgaccacataacggccgcaccggcggattgcagacccttgtagaagcctgccaagttggcgagcttgcgaccggagttaccgagggcgcccatgatcctagaagaaacaatgttagtcagcatgtcaggggaaaagagggagggattcttaccagtagacaacaccctgccaggcagcatcgtacatgccgtagaagaagtaaaggaacataggaccaacgtagcccttggtagtccaatcccagccctggaaacctgtgattttcgcgtccacatcctcacgggtgtacctcctctgccaggcgtacccactaccccaaataacgaccgtgaggatgaaaaggccgaccaaggctgccctagcacgaatagtacgacggacgcgctccgaatcaagcagagggcccatgatacaagcggccacgatctgcgcaaaccagtacaggaagccgttcagggccttggtgcgcgtgttgaagtaggcgccgttgatagagttctgctggtatgtgtagaaccagttggaggaccagaacatggggaacaggaggacgatccacggctccgagcggactgtctcccacaggccgacgatctcggacttccaagaggggtgcttcatcaggatgacgcgcgagccgtcggtacgcacaaccttgtctgcgtcacagatgaacagagcaagacaggcgcctgcaaacatgagtacgataaaggcgatgtaggtaccgtcgccgacagtcttgtttgacgtgacgtggatgttttggcccaggggaatctttagattgacattgttagttgttgttgatggatggtctagccaattgcaagtatagggctaggtatcaggggctgggctggtcttaccaagctaccgatacaggcgccgatgttgaagatagcccagaaccaggcgaagtaacggcccttctgctgctcagtcgggtaggacatcatgatggtgccctgggcgccccagagtagacctgcgcagacaccgaggaaggcgccggcgaagatgttgaaaccggggacatatcgatgctcggagaccaggagactaatggagtaaatgcagtaaccgattccaccgaaggagagagaaagacggacgccgacacggttgacgacggttccggcgaagaaacccacgacggcgaaggtactgttcagggcgatgttctgttgttgacaacttgttagattgtgcatatagaacgcgacccaatcggagtttcggagtatcaaatgggaagagtggagacgagatagagaacaagtgccgaggtccaatcataccattttgtcagccaagcttgggtcggacttgccaccaccgcccatcccgctcaaggcgttaaacatgcctgggcagaggaagcagacaaaggcgaccatacccaactggatgcgtggcgaggcataccagccggtagagaacttgccgatcttcccagacttgtacatccatcctgcgggtcggggtatgtattcaggttcggaggaagattcgacgggagtcttccgttcatccattatgaatgaagacggagtgatgccgcagaagaatagacgataaaaggtggatgtagagaatattaaaaggtgtgtgtggtgatgaggagagaagatcaacaggaagacatgggattctttaaaacaaaaaaaatcataagatagccagcttgtacaatgtacccctgccactcgaagacaggtataggtactgagtccagattacaatgcagagatagatgtatcaacagccaaaatagtgtatgttgcagggtagcattgggtttggtcacgggctggagctagctttatgtggctggccttagggaaaaggataggcttagatattggtggtagatacaattggacaggggttcttatttgcggggagcttaggtaggtgattgggggccaggacgctttgatagtagtgttacaccgggatggcactgtgtctttgctctggcaggccttaagaataactggggaaagagatgtagtatttgtaggtcagcgacgttacgacgggggctaatatagagttagcgaggattagagtcacatcccgtgggaaaaacggaaaatcccaacttggcagactatcgcgagacttatcgtataagcgattaaggagaaggaagggacgggtgctgattggttggctggggacccacaggcgagtccgctggttcaactgcggggagaggccaaaagaggactagcgcaatcattcttgtttcggaattttggcacatttttgacatctgacagtcaccacgtttcttgatctatagttagtcgcggtataaatcggatggagagttgatttgcagagatacagtcagcttccagaattagtatcagaaattaaattccggaactttggtctgaaacgtttcattttcggcttgaccgaagggaacttcatttaaaaatgtgaaaacgtaaaagcatatcagtcgctgtcttggctttcatcctcggaccccttctcgatcttgggttgaatatcactatcactgtcttcactgtcgctgtcgctgttgctgtcctcgctatcctcgctatcactatcctcactaccctctttatcctgcgctttctcattcggcacatccgcttgtacgtctttctgagcgtccgcatccccattctcttggttctgctctttctcgttgtccgcagctatctcaacctcttcattccccgtctcctcaatttcaacttcctcgtctgcttcttcattctctcctgcattctccacattctccgtatcctcaatctccgcatcactctccgcatcgctgcttgacccgtcgtcggattcaacggcccgagcaacctgactgagcggctcctgtttgacgcgctgtgaggcttgctgagcatccacatccatagcatcgtcatcgctttccgcgtcactacccaacgtaatgccggtacttcgatccttccgctttctcccatcaccttcaaggtgatcgtcttcatcttcgcgctgctggagctcttgggcacggcgaacccgtcgtagtagaacaggatctggccgcaaatcatccgcagtcaacggagtagaacaaacaggacatttgaccacacggatgcggtgctggccccgacgagatgccgggggcgcaatagtcgtctggctgcggctgatcatgtccataatggcctcccgctcgaagctgtgcggacatttggtgctcttcacaggatcctggtaaagtgtgagagtcaatgggcatttgagggagatgcgctcgcgctcaatggcaatgtcatcgtcggagccggcgggcgagacgccacggttctggtttcgcgtacgtgtcgatacccccgatcgcacattcctatcttccatgtgctcaaaccatgtagaggagtgtggcaacggtgggacgtcgtcgccggggaacttggagtcgtggaccatccggtagaagccaatgtagttgttattgctggcatatctagatcgtagttgtcagtatctgagccgtcggataaaacagccaatggctaggaataatctcatacctctctgtcaaagatagctcctcccacttctggactccctccgtcaacttatcgaccagcttgcgactaggcgggttctgtgcattgcgctctcgcatctccctctccagcgcatcttcagaattaccatcgttgggatcctcagtcccatcttcatcatcgtcatcattggctctctgccttgtccgctgttgacgggtctgtctcacccccaaagcagcagcgacattctcaccctcctccctttcaatttgacccagcacatcggttaacccctggagcttgatttccgaatcgacaatcagtcgtgtcttctcctccatccgcgcagtaatagcactgactcgagcctctgcgtcagcaagccgctggtactcctcattggactcgtcgtcgtcgacattctcttcaccttcacgccgacgcgcttctttatttttctcgtatcgtccccgagaatcgctaaggcgctcatttacttcaccacctgagtgtgtgagtttctcgacggcatgttggagatgggtgcgaaggttgcggaggtgatgtgatgcgaggagagctgcgattttgcgctggctttctgctgtaaggggtgcctcggggacctcatattctggcaggggtattgcatctgagactgaggtatggcttgcgtttcgtctgtgcgattgtgctgatggtggatgggactgagattgcgcttggcttggtgtggccgacattgttgcggggggagaattcttgtagtaggtgagttggcgagatgcagattactaggagtattatgctttgattcgggtacagggcttccaagccgttgacaaagaaagtccaagtaacaaagcgcatctcgaaatccggacgcgagacgcgattacgctagtcctgtttggggttgcgtataccaacgataagccttatcactatagaacattggaagtactctgtcttccccgacatactacattgtgacgactgcttagaaaaacgaagtcaaaatgagatggcttaatcatacacagcttcccagcaacaaaggcttcttgttttataaatctgcatttgctctgaaactagttgcaaccgttagtcccactctaactgccatgtcgaagatgcggatggcttggcgtccgtacacacatttgattcaacacagatctgcatttactgaatagtataacgaagcaaccttatgcagcgctatcctctagcggtgcaagtgccgccgctaagagacccagtggctgcttacccgcagcctataactcgatcatactccacagtcaaccccaagagcccacaattgacacatgaaatcctgtcataccctttttgggagtgagtggatatgcccgtaggcaaggttctcttgggaactgtaatcatcaatcgtgccatgcaagtgattgagaactattgttatttgacaagtaagaagaagaagattatttggaattgaaatacaaatggtgagcgaggaagagttcacaatgaaacattaaaagaatccatgagcctataccttgtagaagcagtatgcatggtagaagcctagcgatgtcatctgttagcaactgcgaaaagcaatacacatatggatattactcactgacagcctccttctcttcctctgtcatattcaaagcaccagtcgcgcggtctcttacgcccatgcgatcacccagcgggcccagctcaggatgattcttctcatcctcccaaatatccaaaaatggcttgcggtattgtagttctaggttgtaatcttcggtcaggctgggttgaaaagttagttatgcatggcaacgtgatgaaagtcggaactcacgctcggaaagcctcccagggaacaacgtattcgggaacctcttctactgcctccttcatgaagtaactgtacttccacccgaacggcggacggaagattccgtcttcgggggttgcgccagggaattgaacgcgatagatatcgttgccccactgggcccgctcatcctcttcgacttcaccatcctcggggccttctggttcaacaggtttagcagcctcgcgctccttgcgcgccttatggaaggcagacacgcggctggtaatgacgtctgagttgggacaaaccccaaggaaacgaccacctttcttcaagcaacccgcgacattgctgagcatttggcgtgtcttctcctcagactcaaaggcgtagtgaatggcaaacatacatgcgacgatgtcaaagcctccaccgccatagcgagaggccatgatcgatccaccgggcccggcattagcatcgataccaacccgctggatgatgtcgatatcgcccagccactcaccaaagcaatctttcggatagaactcggcatggaaaattggctgcggtggtcgtcggcctcgctggccgcggcccgagcgcatttgatcgtaccggccccgcgcttgctcaattgaaacattggcaggatcaagaccgacatagaggtcaactggctgaggcgccagctgccacttgcctaaatcgccacccttaccacagcccagatccagtacgagaagcttttgattatcaacaggcggcggcccttggctgtcattcgcccagtccttgctgtcctcaaatcgcgcgacaaatgtctcatccggggagaacttctggataagagtactcttcacccagttgttgaagctgcgtagccccttgatcttgctctctgtcttccgccactcacggcctctctccggaaccgcgttgtagtgttgtcgaaccacgtccgagataccgcgctgctgagagttgcgcatagcctcatccacttctgcgcgctcacgttcctcctgtttgcgtcgtagtgtttcacggtctaagaggccctgtcgtgctccgccgcccggtctcttccgttgacgcggtgcatcgggggagggagagcgacgtggctgtagtggcgatcgagagcgtcggtcttcgcgtggtggagcgccgcctgggctgcgagagcggttgcgtcgcgagaatactgacggcggagttcggccccgtttccggagggcttgatgtctctcctggagtcttttgcgcttggatgctgcgcttgatacatgattcgatccgtctgccgcagtgtctccttcgatgctcctgtgtctgccggtatctgttgaagggtatgtggtattcgtgcgggcaggcgagcgaggcgtggaccgcccacgagctgcatcacgagctctatctccattgggatgatccatgctgacgtgagtagagttgtgaactgtttcagaagtgattcgggagaacaatggtcgcgggatctgtggaggaaaagaaggaaaggtgtatgccgcacttaggataagcctaaaagaaatatataattttaggttgatttcacagaaatgtcgcctgcggagttgtgaaagtcagagttatatcagagtaatggccagctggaggtccagagaaagtccaaagagctccggatctcggccaatcagagagttctaaaccaaccctaattcccattcatctatctacaatctttcaatggattcttagattatgatgtctagaaatgaatgagatagatgtattctcatatttgcgaagtgtcgtgtctcacaatgatcataaatcgaagctatctgagaaaaaaaaaaaaaaaaaaacacaagccgctgaaagacacactttgaccctcttcataaaacccgcgctcccaattaatgtaatattaaatagaaataaagatacgaatgcaagatcattgaggcaagacagctttccgttttggtgacttagccgtcaaaacctgtcttactcgtcgaattttcgcccaccattcgcggtccgctttctttttcgcatccgcattttcttcttggcctgcagtctcggttggtgtgcataggtcggtccgcaatgtatcagtggaggccatggtacgaactctgcggcggtgtttgacctttacggcctccgcgacgatctgccacccagcacgtagttcttccaacctctcgttgggtcgcccagtgccactttgggctaccttgtcgatccagggacaatactccatatgctcatcggccacattgagggaagtgtagacggtgacgtctccattatctttgggtttgtacatccataatcccaggcgacggaaacacgctccacatccgactaatcccgcagctccatcggaggcagtatcccagccgagcaatgctaacgccagggcagctcgattgacagctttggatgtttctgttgagtcttggttgtcaatgtctgtaggccgaatctctccgttcatggataccgcagctttctcggtctctttaaaccattcgtccggaagtcctttgataagcacatcaaggtcaaggccttctggagtctgaatgatatcatcagctggtaatttatcgcccatttccaagatgtttgtatatcgcatgtgaaggcccgacagggcagtatcacaattggtcaaagggagatgttggatagtggctaatctgatgttagtcataggacaaaatgttctcagtcttatttgaactcacaatcacagctcttgtttcgccagggacagttttcgccgtgagcattacttagcatttttgcatactcatccaccagcctcgcacctgtaggcatataggttagtataaaacctcaatcagctagatcagagatctgttgtattactcacggacttccttccgctcctccaccttttcaatgttgaaaccgtcgagctcatcgatttcatcggggagcttcacaacgactgcgccgccgcaatcactcacgcaggtgacgcgcatgacgtctgtacagatccaaccacgcttcgcccattgcacttcattgatcggagacggctttgacgtccatcggtcgacacggcggaaggtctctaaccgctcgagaaaacgttcgcggtcccaagggacaaaggttgggcgcttattcgaagttgcggaggctattcggtgccctggtcgcgatatcttgtggattgagttgcgcaccgctgtgagctccgaacggtcggcgctggccaagcgtactttcttgatcgataagttggcggagagacggtcttgcgccgtcgcaggcgccgtaggggctggtttaggcgcgttgtcggacgtaagaggtttggatattgattcgagaacacggtggaacttccgcttctttgattctagagcgtaggacatattggtgctgggctgagaaggaagtcaagtggtgcagatcaacacaacgcggagagggttggagctgcggcgatcataacgcccgaatgtgtatcagcctgaggcaccaacatcgatattaggcccgtacatcgatactcagcggtcaattctaaatcgaacggtatggatgtcagtattctctcaattagaaatttaattctactgtcaactgttgtacactgttgacagtgctattccactccgacaaatgctccactgctgattggctaaggcattccgtgacatcgtacaatcctccgaacttcaccaactttcttccttcactcatctgccttgaccatggcttctctgaggagctctctgtcgctatggcggagtggtgcgcctcgtttggccaaagactttttcacatcccaatgcctcccaagtcagggctacgcagccaaatcaatccgccaattcggtgccctccagttccgtcaacccagcaagattcaatcgacccttctgaacaataagaaattcttcacctccagtatcaagcgttcaaatgccgcaccggccattgcagaggcggtggaagaaggcacaacgaaaggcaaatcgagcttccccaaaattagcgacaagaccgttgcctactggctactaggcagcgcggccagtgtttttggaattgtggtcttcggtggtttgacacggttgacagaatctgggtaggtggaccgaggtgcttgttttccacgaaaagtgagcttcgaatgctgacggaacatattctggcacagattgagtatcaccgaatggcgacctgttactggctccctccctccaatgaatgcggaacattgggaggacgaattctcaaaataccgcgcctctcccgagtttcaattgcttaacccgaacatgactctatccgagttcaagtcgatctactatatggaatggattcaccggctctggggccggtttgttggaatctcatttgtgctacccgcagtctattttgtcgctcgaaagaaggtctccacgcccatggcgtggcgcatctttggaattgctggtcttattggtttccagggattccttggctggtggatggtaaaatctggcttgaaggatgatctctttgctccgggcagtcacccgcgagtgagccaatatcgtctgactgctcacttgggtgctgctttcgtttgctacaccgcgatgttgtggaatggtctcgctattctgcggtctaatcggttgatggctgacccggctgctggagtcaaccaacttaatgcgctgcgcgacccgaagctggccttcttccgccgctcagtcgctggtattgctctcttggtcttcataactgttatttcaggcggtctcgtcgccggtcttgatgctgggcttatctataacgaattcccatggatgggccaaggactagcacctccaaaggaggagctgttcgatgcccgctactcccgccacgaggaccgctccgatctttggtggcgcaacatgcttgagaatccttctcttgttcagcttgaccaccgcgtcctcgcagtgaccaccttcaccgtcatttgtgccttgatggcttacacccgcggctcccccaccatgaagcgcttcctaccggcacctgctagaaagggtgtccacggcgtgtttgcgtttgcgtgttgtcaagttggactcggtattagtactcttctctacctcgtgcccactccgcttgcctccgcccaccaggctggaagcttgttcctcctgacctgggtcataatcttgggcagccgagtctggcatccttcacgtacagccaagctcttgcagatggctgcgaaagctcgctcccagcagctctctaaaactgctgcctctgctgtaaagagagtctaataatcctgcctctcgagtgtatgaatatgtcgaccagggttgattgtgttcatcgattgccttggtaattgataccatctccattcctctgttgactcgagcgattctcgagtcttattgtataactagaactactgctttcattgtaaaaaacatgttttgaactaaatcaaagtttattggttgatctacctaagtccgaaattgatatcccctttttggtttttttgttcccttttttctcttcttcttcttctttcttgcactttttacttcttcgtcctcatctttcatgtcttcacaattgcgtttcacattttcttactctcgggtttcaggtctcagtgatacttcattcctcttgccaggcacttactccgccaacttcgtagcaggtctcgcagcgcgcgcagggttgcggcgtgctatgatgtatccaacaggcagaccgtcctcaccaataggaatatcagactcatcgtggggccactcatctcccacaaccgacatggtcatatcagaatcagtggataaagtatcgacctgcggctccaagacctggccacgtgcaggagccattttctgtccacctgtattactttgcacatcgctggtggcactaggagttccgttaccaaaagatccgagatccagcagggttttcgcagccctcacatcggcagactcggaggataggcggtcttgagtcccatctagggatggcaaagatagcggcatatcgccacccccctcggggacatgaatagctccaaaggaagcgtgtgtatgatctccgtttcggtcggccagacacttgcggcaaacttgccagccgcagttctggcagcgtgacatgccgttcttgttgcgcttgttgcatacgtcgcactttgcggtgtgggctgctacttctgagaagttaacgccgactcgccgtctctgggatcggtggtttgcggctgcatcgcggctcgccatttggcggccgttcggtggcacccggtttgttgagaccgctcgaatcgggttggaagagatcttcttcggggttgatgacacctgtgtgcttggaaatcgtggatcgcggagtgtcgtctgcgcggagttaagagtcgactgtgtgggcgctgttgatgcctgaactggctgggcttccttcagccgtagagggattggaggggcgatatggttctctataagatgggcttgtaagggctgagatgctggtttttgcttcttgtctttcttacctttgcccacgttcacattgggttggaaccccacggtagagacctattagaaagttagctatatttgataccctctatttttataaccatcattctgcacgtacgtcttggtaggtaaatccgggctctcgaaacgcctaacacaattttagaatgatatctcagggaaaagacggatggaacaaacattccggctggggtcaggcgggacaagccatccattagctggatagggtgggtacgggttgggaatggtattgatcttttgtggtgaagacgaggaactattgcctgttccatcgtacatgttgtcagaaagatgcaagctcggctggttgcgcttgttggcttcgacagactcgtcgagctctcgaaaagatgggagactcaagtctgggatgcgagggagacgcatggtacgatggggcatgattgcaacagaggtgtgctcgatggtacttgatgatatttgaaggaagagttcctttgagcaagaatgaaaaaggaagaggatggggatgtacgaaatgaaaatggaaaatggatgtggtgtagataaaaggcttggggttgatgaaggttctcagatgcaagttgtactgggcattgttatatacagtctcatgggatcggatgacgcctggtggtttgtggagagcgctttaggacaggcaaacagatcgaaaccttcgaaaatacaacacacaacacagttctactcgattaaattcagcagctgatcaacctctcgtcaatctcattatctatcttgaatcaagtacaaaaggaagaggtttgtttcgaaattggctgtatcgccgagatattcttgagaacccattttatctgctgcgtttatcataaaacagagaattgcatgcagcccccaagacgcatcgcacatcaatagcatcaacatcttctcgggcaatcacgtcattttaatcatttgtgggctgtatattcatcgtcagtgatatcggctcgtggaaatttgctgatattaataacatacggattccttcttcggggctaggctcgataccgacgacttcggcagcagtcttggggtcggcagcagtcttatcgtctttcatcatggggaaggtcaacacttccttgatgctgtagttgtcggtaaggaacatgacgatgcggtcaatacccagaccccaaccagcagtcgggggcagaccgtactcgagggattggcagaaagtctcatcaatcatctgagcttcgtcgtcaccttgatccttctgattggcctgctcctcgaagcgcatacgctggtcgaagggatcgttcaactccgtgtaagcgttgatgatttccttggtgctgtaatttggttagctaaaattccgcgaagactgataggccaattataggcagagcgaatttggaaagaacggggggtttcaagcaactagaagttgggtgagaacttaccaaacgaaggcctcgaaacgctcgcaaagaccggccatttgacggtgcttcttagctagtggcgacatcatctgggggtgaccggtgataaaagtggggttaatgcaagtgttctcgatgaactcgccaactagcttgtcgagcatgcgggcattggtctgaggagccgagcaatccacgttcatcttcttgaggacgcgcttaaggaattcgttggtctcctgagtgtgaagctggtcactaggggggaacttctcgccgcaagcctcctcgagagcaggcatcatctccacccgcctccagggagccttccagttcacattgtaagtttcgccagactgagtgtggaatacggtctcgtaaccaccagtaacgtgcttaaccagattcgagacgagatcctcagtcaagtccatcaggtcgtacacatccgcgtaagcttggtagaattcgcaggttgtgaactcggggttgtgagtcaggtcaattccctcatttcggaacacgcgggacaattcgaacacacgctcgagccctccaacaaccagcatcttgaggtagagctcgggggcgacacgcatgaagaggtccatgtcgaggtcattatggtgggtaacgaagggcttggctgtagcaccaccagcaatggcattcatcataggagtctcaacctcaatgaaatcaaggttttcaaagtactggcggatgtaggaaacaatcttagatcgtttacgaaggatatcacgtgaccggtcgttcatgatgagatctaggtagcgctggcggaaacgctgctctttatcctggaagccgtagtgctccgaaggaatcgcatgcaagcaaggggccagaagaataacctcagtggcgaagatagaaagttcaccatcgtcacggttcttggggttggtccgaccagggaaacccacaatgcccacaatatcacctctgcgaagtagctcgtgctgctcttcgaagggctttccggtcgagaattgtgcctggcacattacctggatcttaacaccctctgagcggatgtcataaaagttcagcttgttgccggaggtacgcttggtatagatacggccagcaacgcggacggtaacatcgggcttctgttcgcccttctggagaccctcataatccttaacgaatttgcggagatcggtatcgacgtggaatttgtgtgggtagggatccggctgcttagtttcgcgcagcttgttgatcctcttgctacgaatctcgaagtattgctagaacgacacattaattagcgtcgcaggacctaggaatcgacccaggagtaagatcactaacgttaggagtcaagttggcctcgtcatcctcggcagacgatttcttctcggccttgggcttagggggagcagctgcctccttctccttcttcttggcgtccttctcacgctgcttctggcgtctcttcaattcagttttggagactttctcgccggtgacatcatcgagaagaaggttggcaatggaggcagtggcctcttgaacaggattggaatccgccataatgtgtggttacagagaacaagaaagtgggatggtgggatggtgggataagacctgaatttttgggcggggatcggcacggcatgtgattggacgatttcctataactctggggttctttcgaccttcgtgactcacttagattgactcattcctggattggcgccgagatatctatgtaaataagatctttatttgaaaataaaaattatgttttatctgcgggaatcctacttcactttctccgttgtcaagcacctcacggatactaaattgggatgtagggcttagggcactggaggtatctaaaatagaccttctccaagcattgcaattcctcctcaaaaagagctatggaagcctggaagcctggaagctatgctaacacaatagcgatagcctgactacaactttgagcagttgctacagccttgttcctaggcagtgccactacacgtgcctgctttaaagtggctcgctcctcgcaatgactgtttttttgactggatagagtgctatagatcgtccgctatctgaactttgatattttggtttatcaggcattagttctgcaatctgggctagcttagcttactcaatagccaaatgtacagttcaacattgaagtacaacgccatagtatagtaagaagggacatagcgcatagcgcacagcaagatggtagggtagatactttaaaccagtaacaaaattaagtcacttttatcacatcaacttcatcatcgtcaacaactactgcaacaactgatccaacaactgcttcaaaactgctctatcattatagagggaataaaatatctagttttaatttaaattgtttcatgttcatgcatgacagagagagctatggttcaaagactctaacagtcaatttaagaccgcgattataatccacgttcgtggtcgagacccgacctgatggcagcatggaccttcggttcccaacataaaaaattgaaattgaacggaacccaggcccaaactctcccagagttaagggacagtcaacgttaccattccacgacatctttcttcgcgataaaaagggcagggaggctggttttgttctcactgaaagcgatatggaagagattgcggagaaggtatgggcagtctaggacgtcgaggagtaagagaaggatggtgaatgggccggttagctgaagcgttagggtggccactacgcagtgtcgactatcttccatctcttcttttgcccgtcgtataagcgagaacctcttgcatcccatattttttctatcattggtcattttctggttatcccaatcaatttgcttgcttttatttatactatccttgtctccctttcatttaaatacgcctaccgttctcttcatcatcttcttctattcacccatctcctcgacctcggccttgattctgatttctcatcctatctgctgatggcagttgatttctgtctgcagacttcgctttttggctatctgtttctccctgatacgcctcatcatctgcagtagctttcacttttcggccaacttggtcttgagaatcacgcttaactctaatctgtgtccatctgtgctttttgtatgtctcaccttgccgtactactagtgacactaggcatcacttcctgactcttattaatgatcttatggctaaccataactcctccagatttaatcacaatgtcaggcttgtatgatcgagttccgaagtcggaacccagcctagccatgtgtgagtctggttactcttagtagagaaggtcttctcgctgactagcctcttcatacctctagccggcttagctgttccgattccagtgtctcatggactatctgatgttccttctgcccatccaatccccgcctcctctctcgataatcttaccatggacatgaaaaatctggtcagaaaaattcaagacctcagtcacttggggattgaggacagcaagattatgcttccgaaaatatgtgtcgtcggtgaccaaagcaccgggaaaagctccctcatcgagggtatttccgagatcaaggtgcctagagccgaaggcacctgcacgcggtgcccgttagagatcaatctttccgaaagcgacgacaactggaaatgcgtgattcacctatcacgccgctacatctttgatccatcgaagcggatgaagatgcccaagaagtcagagccactaggaccatggattgcgcttggcggccaagacgatgaacatttcatcaccttggataacaagcaggaagttaagaaggctatctggtgcgcccagttagctatcttgaaccctagtacagattcgcaggattttcttcccggatctaccgacatggcacagacacctcaggttaagttctctccgaatgccgtgcgcctggatatatctggtcctggtcttccaaatctatcgttctacgatcttcctggagtgattagccagacagaacaagataatgaacgatacctggtcaatctggtggaaaaccttgtcaaagattatgtttctcaggagcattgcattgtactcctcaccctgcccatgacagacgatgcgacaaattccagcgctgctcgtctcgtcagggacatcaagggcgcgaaagagcgcacccttggggtgttgacgaagccggatcgccggccctccgacgaagcatttgaccaatggcatgagattctggatggaagcaagttcaagcttggccacggttattatgtcattcgaaacaatcctgatccacttgtcagtcacgcccaagctaggaaggaggaagagatgttctttgattcttcactgtggacacgggacctcgccgcattcgaagatcgctttggcacgagacaactccaaacggcattgtctgacctcttgatgcgtcagatcttaggatctttgccctccatcattgcccagattgatgagaagtccaaggcaattgatgaagaactgcaaacccttccaaatcctcccactgaggatgtccaaagaatcctttgggggaaaacttcagaccttgaaagaaaaattcatgaactgttcgatgggacccccagcatcgagcacggttcttcccagcgaaagccgctgcaagagcagtggaacaagattgttatggaccttcaaaccgcacttgcgaagacacgccccatcttggatgttgctgcgcagaaggaccatgaggacttggctgaagttgttgactcggattgtgagttacaaattttgagcgttagcacaacaacgccaaagaaacgaaagtcgcctgcgagttgtacccctgcatcggaaccagcaactccgagaaggactgtgtacagcacatcccacttcgaggggtcgaagtctgccagaatcagtctacagcagctcaccgaactcaagattcgctctaacacagttggtgtaccgaaccagcttgatccccgagcgatcgagaatttgaacaagaggagcgttgagcattggggaagactcatggagattttcctcaaggctacgcataatcttgtccacagtatgcttcttgaagctctggaggaagaatttgcacaatatcatcaaactgggctgtatcaggaacttagcagatttctgaaagagttcatgggcaagctgcgccaggcccatcttcaaattgctaaggattattgcaagtccgagcgtgagataccgttcacaatggcccaaggtcagcatcaactcttgatgcaacagacttcgaacgtcctgaaagctcgtcgattcaatactcgcgcaacttgctggctgaaaattcgtggccatgataacgatgacaagatttcggagaaggtgaagaggatccaattagagcaacttggtcctgatagatactcccaagaacttgaaatgatggccgtaagtcttctagggagatttgctgacattcactaattgcggtcatagagctcgcttgcatactacgatatcgcatcttctcgtttcctggacgtgttgtgccagtctactcacatgaagttgttccgggcttgccgtgcaagtctcgttagtactcttcgtgatgaccttgaaatatttggcgacaacggtgagcatgcacattatatgtgtcaagtatgagattaaaaaatgtttctaatacgtaacttaggtcgcgcccgctgccttgacctcatgacggaggaccctgagcgccagcatcgccgtgctcagttactgaaagagcgggagaagttttcgaaagctcaggaatggttggactctgtccgagattcggatgtcgagatggaagacgaccaaactgctgttccagacatcaaagaggactggtgattcctcaaattgtcgtttcctgtggtctccatgattttgccatttacactggtattgaatgggccaaatattggcttgaggggaagtgttttcggggagttcctgtgagcttcaatactgtttcaaatgtgatggatgggatggagatatgaatcaaatggaggaatggaaagatgtcaacaaggactcctgaaaatcgtgtttgttaggccgcgatgatcgcgaatatacttgttcatacctttcccgaatttgataccaaacatttcggggatcttggaaggattgtaagattttgagcaaggtgtaagcattcgtctctacgctcgagtttggtaggctttggagctaattccattggccgtcgaatccctagttcttggtggcctataacaagcttttgagaagatgcgagtagtatacaaaggtgcactgatatcatgccttcagtcttcttgtgtctggagaaatgaaggcggtaagagtgtatcgtaccgcctttttgaaaggggaaagggcacccaacgatcccaactgctcatttgcctcgagccaatcagcccttttttcataccagtcaaaacgcaatcaggtgtcttcgcctacatcgggtgctctattacatctaccaagacccgcgatgacacgtcgggcagcaaccctgccactgctcagaggcaacaccacattggagtcagcgctggagcaagaggaggatgtttttcttgacttagattacccagaacagcgcattgatttcttcgtgttactgtacagcaatcgtgatgatattgagcgtattgcctcatatcatctcggtctaggtccttcggatacttgcaggactggcgatgtaaaggaatgggcccatggcagcttcaatgtttgcattctgctctatgtcagtaaacaaggtcaatatctaggaaagcatgctctcattaggtttcctttgccctacaaaataggagaactcaacacccccgacaatgtggacgagaaactgcgctgtgaagctgcaacttttatttggatacatacgcactgtccggaaatatccattcctcgactgtgggggtttggacttgttggaggtcaaagtgtacgggacctcaatggatattggccaatagtattacatgacttctaacatatctttacatagtttacaaaaccggagaatatctctctcggaactagacttctctggactctgaaaagatctatcatacggcttatagggttctctctaccctgtccctatatatctcatcaacgtcagacattactcgaaactgggtacttggtgattgactacattggcaactcggaagttcaaatactttcagagacatgggataaagactgtcatgagcaagtcataagaacaaatctttttcgcgggctttcacggatgatgctttctttaagtcagataccactcccccgcataggttcatggaccctcgactgcaatggagttttgcaactttctaaccgacctcttactcttcgactctattaattagaaaacgggggaattccgaccaacatcagtcgaagcctgacctactcagcagcggatgcatactacctcgatcttttgtcttgtcataataatcgcatacagtatcagccaaactctataagcgatgcggatgatggccgggtacagatagcaagattgacgataatgaaagcgctcctacctcatttttctaacaaagcgcttcgagaagggcccttcctttacagactcactgatctccatcctagcaacatatttgtcgatagcgattggaatgtcaagtttgtgattgatctcgaataggcatgctcactgccagcggagacgttgcgtcctccgtactggttgaccggttgttcagtcgatgaactaacaggcgggcatcttgaaacctttagtgaggcctacgaagagtttgtgggtatttttgaggaggaagaacaacagttttcccctatcaacaatgaccattcttataggacaaatcttatgagaaatggttggcaagtcggaaacttttgatatttccatgcattggacagcccgaaaggtctattcaacctcttttctcagcatatttaccccctttttgcaccttctagtcagtcaaaggacgattttgcacgggttgtatcggacttctgggctcccgatgttgaaaaggtgttagctgccaagcttcgggacaaggaggaatatgaaaagacgcttcgccaaaggttcgaggatgctgttattaacgagaaggatcgggattcagagcattaagaggagtttcggtgtttctaacttggcaaaactcatgtatcagaagacctttgggagttcgactattacgctggagtttgatgagaaaaagaatgttatataatctatgctcaaacacgaattagggtgaatatgcgacctccgattgaataactacccttggccaagccctaactgtcctcggtcaggttgtataggaactgcgaagggcacgtcattgaaaggttctcagattccactactccccaactgtcgagatggtcagagattgtcaataaaatagccctctacaacgggtagtctacgtaattcaagacatatatcaaggtaaaaccgttgaaaaataacgtaaatgttataaaacagcgaagcattccagtgtgcaaggccggaaagagtaaaatgttgtcaggtgccccaccgaaagcgtcgtcttggcgtttttggggagcttcggggtctgtctggccttttggattcttatgattctagacttaacatctctttgcataccgttatgcttcatataccaatgcgtgaaaatcacaataaccaggcttccactaaggctgtgatcttggtgagtgacgaaatcatcgcaataaacaataactgacaccttgtccacaggtcggaggcccctcaagaggcactcggttccgcccattgtcgctcgatgtgccgaaggtatgcatctacctctgatttgatcgttcattggaatttgcgccggacaaaattgacaccgcaatccccatagcccctattcgaagtcgctggccaccccatcatccaccactgcctgaaggcggtggctaaggtccccgatgtacgcgaagtgatgttggtcggatactacgatgagagcgtattccgggattttatcaaagatgcctcgaaggaattcccccagctccgcatctcctacctgcgagagtacacggcgttgggaaccgcaggtgggctgtaccacttccgtgatgcaatcctcaagggcaagcccgagcggctgctcgtgctgaacgccgatgtctgctgctcattcccgctgggcgagatgatgcgcctctttgaggagaaggacgccgaggctgtgatcctaggtacacgagtttcgaacgacactgcgacgaactttggatgcatcgtgtccgattcccacaccaaacgtgtgctgcactatgtcgagaagcccgagtcgcacatctccaatctgatcaactgcggtgtttaccttttcgctaccgagtgcatcttccccgccattcgcagcgccatcaagcgtcgcaccacccgcccccgcctgctctcgtacccctcctccgacaatctggaatcctccttcatagccgccggggacgacgaggacgccgagaagagcgaggtcctccgtctggagcaagacatcctctctgatctggccgatagcaaccgcttctttgtccacgaaaccaaggacttctggcgccagatcaagtccgccgggtctgcagttcctgccaacgccctatacctccaaaaggcattccaggccgagtctcctgaactcactcccccttctgccaacatcgtgccgccggtctacatccaccccactgccaccgtcgaccccaccgctaagctcggacctaatgtctcgatcggcccgcgtgtcgtagtcggcgccggtgtccgtatcaaggactcgatcgttcttgaggactccgagatccgccacgacgcctgcgtcatgcactcgatcatcggctggagtagccgtgtcggtgcctgggctcgcgtggagggcacacccattcccgtggccagccactcaaccagcattgtcaagcagggtatcaaggtgcagagtatcaccattcttggcaaggagtgcggtgttggtgatgaggtccgcgtgcagaactgcgtgtgtctgccttacaaggagcttaagcgggtatgtgttatctcttgttttttccatatgccattgactaacgtttcctgtaggatgtgtccaacgaggtcattatgtaatatgagttttggtcatttttggttgatatttatcgccctgatctcctcgttgatacggcttcattgtcgggtttgtctcatctcgtcttatcttatggttggatggttatttgcttcatgagcgtggccgatctaaggatctttttgttttaatctatctagaacgaacccaaaatgaaagagtcgttggatttttttgcattactatctggtatatgtgggtttcgtttccctcgtataattgtcacatatcccagtaatcgagcctgagccctcgaaacgccatgcacccgaaacacctgatacaaacgttcagatataacccccagatgaatatcatgaaatcccgcatgttgtcatcaaagcaaagaagaagagaagaaactccaagtaccaaaaaccactcagcgatacatagcaggatcatacccagtattctcagcctgcctctgatgtccatcctggtcataagaactaaagtgcactcgaggggcggcacggtgattcatcccgggcgcatcatgataataattctgcgcctcaccagcaggcgcatgctccaaattgtgctcataaaccgggggcgcttgatcatggccgtggccataggcaccgtgcatcgcggggggcacattatcataatcgtgcaaggcaggggtggattcgctgtggcggtcatccatcttaacgtcgaaggcgtccgagtcaccaaggccaggatgggatcccattggatcgtagacgccgagacgggtttggcgacggcgcactaccacatctagccagaccgcggcgatgtagctgaccaggccgataacagtgaatgtgaagagggctttgtagctccggcatacggcgatgccagtcgagttgccccagtaggttgttgtgcatgatgttgttatggtgcttgccaggctccagctcaggagacccaaggatagcgcccagaggattgtgaggaggatgttgagcgatattgagagttttgttgataggccgcagctgcagtggattattgaggttaggaagatgttgaggagggagaggcctgatgcgacgaagagctagagggttttatgttagcgtttatcaataagatgggtatgttatttaaatggtcacttaccaccaggaatgaatatggtagtttgtagccatcggcgtggaggtggtaggtaaacaccgccaagatcacccctgtcacgattgaggagagggagatcaggaagcggatgagatgaaatggcagcggcggatatgccgagggtttgactgagggtgatcgcatggcgagatgtggaagatgtgaagatgaaagaaaagaaatcagccagagaagccctacagtcaacaccctgatgatcggcgctccacttgacacgtttgggcgtgcgtcatgtcgctatttttatatttttcatgggcgcagcttgcatcttcgtgaaattgtttcaaataagttgcatattgaattctggacatattgcaatagaacgtaggagatcaagtatcaattaacttcaatatctttcttcaataatcgaaatccccatcaaccaccgttttccccagccaatttagagccattcgcctcaacacaacacccgcgcagagatacaaacatctgctagcgcaaggtctaagtgttcggcctgcattgcatccatcgtatcatttccactttccaccccagacaactggatgcagtcccacacctgccgatcggctccatcgagctccacatggtaaacaaagtcgttggtaggggcaactgtggtcaccgctggaaaccatcacgcatcggcccttgatcattgctcgggatggaccgaaatcaccgcagctgggagatatccaactctggaagatgttcgagaaggagcgtgataccaatatcaccagccacgtaggggcgatggactttctggacacaagaagcttccccgacttgctcatttacgtgaaagagatatctggtaatgggaccatgtcgtcggactatggtctcgaatagatcggcgggtttatcgcgaccggaggaagacacgataaacgtctgaacatagtcatcgtttaggttggttgggtcgtcatctcgcatgtggctatagcccatgaaatagcagtgggcctgttaccattctaccatataacttggctcttcgcgggttctctgggtcgattgcctgcctcgagtccatgtttactttgtaggcatcagtttggggtcgtatttgctgtccacctgtgtctgaagccctatagcgattcggtaactgacgtttaaaagcccactgtgccgcgccatgtggttgatcatggctagtcttgggaatccaatgtacccagagcaagcagtggggattgttgaacaagaagtgcagctctcgggcccaggtacagcgcactcggattgtcgccgtgagggacttgaagcaagatgacagggtcacctacctaatatatattagatatatcaccccacagctacttagaacgaagcggtttccttttaataatgtcaatatccctagtatctcaagtaactatcccatttctcttttattaacgtacatcgttgctttacatatcaatttggacccctcaagagcttgtatagtaacgagccaatcagaactgccgcgccgcgttatcgactctctgccttcggggaacttcgtttataaaaacaacctacaacacctgcacccggtctccatttcccttttacagctcaatcctgtgcaacaaaaacaaacaatctcataggtgccacagaatacacgggctctccccgcccacattcctttaaaaacagctatccgaaagcttgcgagtcttctatcccccaccatgtcgacctacgaaagtacgaatccccatctctcaaatgaacctaaaattctaaagctaacatcattccagtcgaacacaacactaccgacccctcaacggccccaaccgcgcgccgccgccgccccgacctctccaccttcttctcaaccctgtcccagatcactccagctcccgaccacagaccccatgcagtccccgtcccaggagatgtgagcgcagcattcttctctctcgcagaggcgttggatatgatgcgtcgcgaggccgattcagcgccgcgccccgacgcgcaggaaggcaccgactcagataccggtcgcgatctgctgaccacgatgatccagtcgctgctcgcgcaggcggatatgccgccgcggaaggtggagggtgttgacgaggaattctgtgatagtaagaagcactcccctagctcgccgcgcccatcaacctctcccgagatcagcggggtattcctttgtccatcacataactaaccactcttggatctctttagtgctcgaacgcgtcccaaaagcatccctcaaaagctccgataactgccctatctgcaacaaccccttcgtggaagatccctacccgctcgtcgtccagctgccctgccacccgacacaccgcttcgatctggaatgtgtgcggccgtggctgcggctgcgcgggacgtgtccgcttgaccgtgtggactttgcacagcagcagagagacaaggcggaggcgaaaaagaagcttgttgaggaggatgaggaggaggaatgggatggtatgtatggctgaagagatcctacacgagactatgtatctaggtgcatcgtgaactgtcttctgtaatggagacgagactacatggcagtattgcctatcttagcatgagtgaatgactgttgcatctgtcgatcatgtacattttgatcgaatggatattggaagtaagctgaccggccaccatgttgatcgttgtgcctcttcgcccttaatccatatcatgaccaattcctcgaatcctggtttaatgtgcatattcacgaacagtctgtcaggttttggctgttagatgtgattctggagctgaatcgcttttgacaacgtatgatactcccgagaagacgtaagccaccaaacagatcaataatgtaaaaatatagtaaaggaggacaacaatggtgttttgctgtatgacctatacgccttagatccgaaaatacattggcaccttcatttcgagtcaagatcgagatacgcctatccacgagtcctttgtttcctcgttagctttcatactctaataactgatagtactaattaagcctgcttcaaagacctttgtcctctctttgatcaattttttggacagcttcattcattcctttgtctattttttgactactttcctaacaatgggcatacaacttcatatgaagctgcagtcctcgtgggatcttcccgctgctcacatataaatatcaagtcctcaagacccgattcatctcatttatcattccagtagacattctcttcaagtcataccatcttccactgtactcacagactgtgacaggacttcttctgcggattaccacatattatcgggtattttctactcccattcctccctatacaactttatctacttgcttactctttaagttactatcaccacgtttatgaatctcaaccacaaattggcaatccagatacttatcagtgagtatcccagcctatccaaccaccccaatgtctcccccgctggagactctcgcgcttgttttcttttttctattactgggaatgaccgtcatgataatgatgattcttgtcaaggaatggaccgagtaccaagctatgcagttttggccgaaactgcgtagtactcgcactctcgatctggagtcgggcctttatttactaagggacgtaaaggaactgacatggcgcgttgagcagatagaaactgattttggtcgcaagatgcacctcgctgaatacttgtgtgaataccatgatcaacccccatctgcttaaccgctttataactgtcagcataccttccgataacagacgcaagacgcaaagaccgaatatctggatgcctcctatgcgtagggatagcgcatgagatactcggcccgagtgggtcaccccagttctctaccccatactcccatgtctttcgaggcggctcaccttgatggatctagagtgggtagggttatagtactccgcagtacgggcggcttataactttttgttgaagccagatcagtttgaatgtgcctatggtggatatattacgtcaatatctaccataggcgctgttattgttcattttagtcttggagccgtctatgaaaatagaaaggtggagggaggattatagcgactttcgagtaatagccaactcaatatccgtagtcctggtaaaaaggtcggataaagacagctgccaagatactctgctagacatattttacaattagtggctgctttgctggtcggcggtagaaatcatttgttaaacttggaatgtataccaccttagtccagtagggtctatatgaatcatgaattttacagaagaaaagaattgtaatagtccaaaagtatttcagattttccgtctactctatgtacagtattcggtacagaattcatcacacgtaacttcaatgcttcataaaatttcctcagcccgagccttggatcggatggccaacttgcctgcctggttgatcatagcttcatagccgcttcgctcgagcacaccgccatcattattgacaacctcacgagcctcgagttcttcaacaaggcgctgattctcacggttaccctccagcaagaacttgaggcacatcacagcatgttctttgatgtatgggttgtgggcgtcgaaagcggtgcagcaaagaatcgcctccacgccgccgtaacgacgaatctgctcttggacatcgggacacttccagacaagcgaggagagcacaagcacgaccagcttcttgagattgcgccattcaaactcagagggatcctctgtgatcggcggggactcaggtcgagagtcgacgctgtcggcgctattgtcggcagggtctgggtcgctagggtcgtaaggacgttcgacagcaacaggggctggaggactagcgtcggaggcatcgtttgcggtgtcgtttcggggaggagggggagggggcacggagccaaaggacaattggctcagctggcccttggggatgcttgcttccaactccttgatcaatgtcaccaaatcatagacaatctcccatttaaccagcaggttcttccagtcattgttctcggtcagcaccgcgaagaactctaaaaattggtagacaccttcatagacccgttccatatcccatagattgagcgggaagtcctcagaaagagcccgctcggcgcggatctggccttggagatagattagagcacaagtctcggggatgatgttaccacggaagatggtgaagatgtatcggacagtgaggatatcaactcggttgagcgagctcgggttgcgagggatattaggttgagccgagcctgtcacagacgcaggagagtacttggctcggaagatgtgggtaagtatcttgatcacaacagcctgggccggagagatgatgtccttaggctggccgaaatccgagtaggcatgagacataaggccattcttaagcacggcctccatgatctggaccatcatcttgaagtagagctcgtcgtcgggaaggtcccatgccgcaatgaaaatcagtagttcacggagtaggttacgtcctgtctcctgcgtgagcagaatatgacagcggagcgcttgcatgttcctagatccattccgttcgccgcccttgaggccaaagctgtccacaataccggcctgaacaatcataggcaaagcttcgatttctgccggtccaaggactagagggatatctgttagaagaccccgctgttgatcaccaggacggccacggtattcgtcgtcttcctcttcttcatcatcggcttctccgtcgacgccatcgtcatccacatcatcctcgccatctccgtccacgcttccgtcagccatatgatccaggctgtgtgaatcatcatccccaactgtgtgtgaatcaccgtggtcatagtcgtgctcttcgtcgccatcgatatgtgatggctcctgaagccgagccatgagttcatccttggcctcttggagggtctcggcagccgattgagctgaccggggcatactggtatcttcatctgtaacaggtccatcgacagcgccaaaatcgttgatctctggaagatcagcccagcaaagacgagggaaaccagccgtgagactgcgatcaatagtcaggatggtcttcttcttggtgatttcgtgttcctcttcttcctcgtcgtgttccctgtggtcatcgtgcgcctggtcttcgtggcctttaggatcctcgtgctcttcctcgggaagcgcagccgggagctcacgagcgcggtcctggagatcagaccaaccgtcaaccttagcccctagtatcgcagtcaaagcagctctgatatccttgacctggtctgggtctctgcccatttcttgaatagcgctgaggtctcgccctaaaatcctctccatgtgatccttaatgttggccagaagcagcatggcagcctcttccttgatagttgccggctcccgggggaacttggcgatagtctccaataacaaatcctctgcagtttggtcgtaaagtgcgcgaatgggcgggttgatgacacgctctccaacttgtacaataggcgccactccttctcgcgagctggcatcgtccaaaggctccttgggttttatgatgttcgtatcagcggtcgaatggtaaccaaacagatccagccagagaaccatcttgcgatgctcattgtgcataataaagttgtgaaggtactgtagacatgtaatcagaaggcgcttatagaggttgacgactttctgccatcgctcctcgttccgcgcattttgctcgccatcgaagcctcgagcagtcacacgaacacatgtgtcgatgagagctagaatcctttggtcaaatccggtttccgccgcgaggttctgtgccttcttggttgtggcgaggagattgcgagcgattgtacacagatcattcaagcgctcaatgtctttgaccagtgagaaataattgtatgcgatcagatttgcagatgagtgttcgtagcttgctgcggggcttttccatgcgaaagattgggactcaaggacggggattgcttttgtgaggacgttcgtgagaccttgccagatatccggcgacatgccgagattgtgactagcagggcgcaacggattagtatacaaagcatgcaatggtcaatgatattgcgatcataccgaacatcgctctcctggtgtgtcttgtacaggatctgcttcccagcggcaagcatgtgctccaagcgcttgtcatcaatcatgcctcgaacttcgtagtggctcagtgtccctgcaaggattaccttgagcatgagctcagctggcgtgcataatggctttggatctgccatactgcaaagaaaactccagctgtaacgcgtattccttcaaacggtaaacagcgcggggagatcagagtgggatgaagaatctaagattcggaggtgtggagagacaaattttccgcccgcacgaatgttatcgttatcgcccattcgcccattctaagctcccagggctattattacgctcatagctctcttattggagaactcagaccttggaaggttccttggacgtatgttgtatacttttaaggtaaaagtgctccaaattgcctataatattcaaagtctataaactagttgataatactctactagtgtatccatggatgctccatagtatttccgtggtgccgaactagtacattttctatttagaaaccaacaagaagtacagaattcgacaaaatagtatgaaaaccagataaaaaaagtcagtctaaaatgacaccaataagacaccaaaaatagccatatactagtccaagatcaatggttggtcgtactactattattgtgaattaaaagaactatatatggttcgtgaaggcagtgattgaggcggcaaggtagtgttcaatgagagggttatgaatcggtggcatagctatttaaactcatcgccttttaagcatagtctcactttgaatgtcgacaacttgtagatagcgtcttcggaagtatattttaaatattcctttaaatcaaagttcaaactccacagatattccacacaaagaggttaatgccggatatctccttagattaacggacagatagtcctatcacgtcccgaagattataccaaaagcccatatcgtagatgttgtcaatatctctcatagtatgaattcgcttccatcgagggtcaggaggtatgtctgatcctggccgacgagcaatgcaattggactcggaggccaataaacatccttcagttgggggattttcatcagtgacaaggatttgatcagtatgaacaggccacagttgatcatacggatccataggaagagggctgtcgaaaatgagactccggtttgtcttgaaaacgaagccgtcttccacgtcttctttccaatcggtccactttgcactctcattggttgtcaccccagcccaaatgagatatgtatggtacgccaggaaagagatcgacagcggggcagtcatcaccatcagtagaaatactgtcccaattttgggatcagcagcgatcacaataccccatgtgttgatccaggttgtccagccttgcataacctcctgtatctctggcggaaccatttgcttaagtgtcccggagaggatggaatggccaaggtaggagccgtagatcaacatgacagaaagggagaccaagagcgagatgaagtacacgcaattgttagccccgacgcagttcatcaaccatacacagtggtggtcatgtcgagaaatacaagcgcgacagaagctgcaatgcttgctgcgcgctggcttgaggaatttgcaggtgctgcattgatgtcctggatgaaaaaggactcggtcatacggatagcgtctcatctcttccgcatggttctctgctgtgataaatgacttggtcacaatacacttgtacagcaggaaatatggcaagctgatagttgcgggtacccagagtcgatgaatgctcgaaagccgaggccacgcagccgggacaaagatgccttctccaatgaccagcaaggagacaaagaagatctagtatgcatggtcagtatctatgtgcataagtattaataaattcagagacccaccaggacaagcgggtggttttccttcaatacatagctgccagatcgattccagcatcgtaatacccttccgccgaacaagcgattatcgacaatcgcaattccatttggaaagtacacccacagtaccctatgcagccaggcgaccggggttttccttgagcagtcagcgcagagcttcaagagtttctaagttgccagatagctcaccggaaagctggcagcctgccaaatagcgcgataaaggtgaaagccgagaccgccagtatcaccagaccaacggttctgagggcccccattctgaagctcaagttctatcggtaagtccaaaggatatacttttctgtctgcatcttctggcggtatccttcactgttcctgccttccttgactcgtggtcggtccatgcggtctcatcgaaagtcgtcggttgtgtgtaagccacgtgaccgcgttctcagtctcggcgcgaaccgacggtttcagctatgacccttgtgaattgagactgccggaattacatatgatcgaatacaagaactgacaattggctcagcgagacaacgcctgtctggtaccatagcccgctgctgaatgggggaagagccccttgcgacacgtcaacacgtgataccgcgtcgcagacaaagctggcctactttagggcgtgaaagctcgaggaagagctttttgcggcttgatttctgagaagctaaaatggcaactttcacaaatgactcctctcgggccgagactacggcaacgaatctgtttcaaggcgcacgattctggctatctctcactgttccacaaaggtcgaggtttaaagaattaattaaggtacttcgggatcaatttatcttctttaaagcttgcagaggttaatgggtatctagcaatatggtggtaccgttgtgctgatggagaaggatgccgatgtgaagctggtggatcacacgagaaaagacctgcctaaggacacgtacggaacacggaactttactcgctcaagatcagtgtactaattcaatattagattctcatatcgatatgtagagcgttctatcagcaagggacgactcgaagatctagaagcgcaccgggttgggccatctgcacctcgtccaatgggtgcatctaacattcccacgaagagcacaagatcgttctataccctgaaagaggaccaaatattgtttgactgggtcgaaaactttgaacaagagccaggggcgcctattcaaggcaataaaatttaccaagatctaagtgaactggtatgatgctctcttggttctgtcaaggctacagggcacacacatctaaatccgatactaaccggtagggcatagtttcccgctcacccatggcaatcctggcgtagtagatacatcaagcatcttcgtggcaaaggccgtccagggggcggcaccccattatcatatgacgaacttttacagtctgcaccaccccaaggaggacgcccaaagatcttacctgcccgaatttccctaaatgactccacagcaaaatctagctcaagggttcctcggctggcaccccctgctccggcccaagcaagtacagcaaacagcccaaaacgaaaacgagatccggtccctgaagcatcgaatcgaaagcggctggatgtttcacctacgaaaagaagagcaattgaagcttctgacaccgtgggccttccctcacgccgtcccaatcctgatatccggagaccccaaccaaagtcatcagatgtagcggccacaccaccctttactacacggccagaaagaggcccacccggtatcccgttgtcagataccggaccgcttcaaggccttgggattccagaactctttccagtcctgaacgcttccatacagagccctagccgcgtccctcgggagacctcacaacgacaacgaccagcagatgtagcagccccgccagccccgccagccccaccgcggccattgggggacaatgccttcgcacagtctggccgattcaagaaacaagcatcgaatcctaaaccacgagtcaaagatatcttcaaagacccagtggatcccattttcctagagctcccattcttaccatcaagcccagcatccgagacgactgacgatgacacctcagatgtgcccgacgttgatacttggattgatcaacgcctggctctaggtgccaaagaatcccacgtgttcgatgctctgcggtgtacaagcatggtcccagggatggcagataaggttctcaaatacctcaccgctggcaagggtattcccgatgatatgccgggagtctggacagcagaggatgatagctgtttacaagcggaggattattcgcgggtgcggcgagtgttgacgaagcacggcgcagaagcgtacaaggatagatgggaatatttcagcatggcccggcagacaggacttattgaataattgaataatacacatgaaatgtggaacttgaaatcacacgaaggatgactacaatggacgagttgaaattgtgaagtacatgaacattagcgtgcagctagaaacgaaatactccccgaagacaccggtatgacctgcccagaacgcaaagaggaaattggaactcaaaagtaaacatcaatgtaagggaagcagtgccatattcaaaacgcgttggtcgcagtagagggagaattgtagcgatggccactcgctattgcacatccgaaattgaagaaacggcctagaaatatcacatgtgtaccagtttattggtgatatatcgacttgtcaatgagcaggatagatttagttatccttaaagacactatgggagacgttaggaacgaattccgagctttcattaggagattctaactcacagatgcgattcgtagaacttaagcatctagtttgatggttagcatctttatcgctgttttggcacggtgtaagaaatactttcagaggacacttttcatagcaggcctggacggacagtttcgccttgcgtccattgttgaactcgagccacgccatgagacctgcctcgccctcccggacaattgtatccaccgctttcacttccttatcccagttcttcccctttggaagccattgaatgccattttcttcggacgagtgggaagcttgactggttgtctccttgggtgctgattttcggcgctttctcttggcttcgctcgctgcggggcccggtgcaggcttagcaggcttcgaatcacccatagatttgcgcttgcgacctggctttcctgccacgcgtggctcttcgggcctcttcgggcgaccaccgatcctctcgtagtatgctgtgacaatatcggaggccccatccctatagtgtttgtcaataaatgcgcgaaacagatgtcgaagcccaacaagcgcacaaacttacatgagaccactttcctcttcccatgtttggtcttctaacttgtcgtaacccttccatttcacgaagagcttaaaggttccctgtagttggttggcttctcggcacaatgagactgagcgttgtgaacatacatcatcaagccaagcgtgatcagtaatatcctcgacgacgtagctgcatccagtcagagacatgtatcgatcagtcggccgcaatgcgcaactaacagtccttcttcctcatcctcatcctcatcctcctcctcttcgtctccttcgtcccgggagtcatggaagtcacggtcgtctttgccatttgcttcgggtccatttctgtaaggaatgtcggcgacttcttcgtcggatacatcttcaatgggagctaaggaacgaatgaggtcaatcgagatgctcagcattgcgcgtgcgacagatcaacattaggagaaaacactcacgaggcatgtttcggttgaacggtgagatgagattagagagtttggaaaacagattggcgattagaggattgaaacctcaatggcaacggtaaattcaggcgaaagactgtcgcatccagagcaatcgagacagtcgagaagcagaaacgcgttaaaggcggacaagatacactataccgcttttggcagtcagaatttcatttgtcaaaagtgcatttcgggaagctcccctcaaggctcagcttgcaagttcacactgctttgtctttttacttactcttcattatttctcgatctccttgtcgggttccctcctttaataatctctatattttgccaggtggcagcccaccgtcaacatggcaatgcgtaaggccgcacccccatacccctcattcttgaaatgtgctgtggctaactatgtggattttgatcttcaacagagcttgatatgtctcagggtgattactcctcgaataagatggtgcaactacgattcggtcgctgacatcaagggacagcttcaatcttgaaggatgagcagggacggccgtttattgtcgttcgggagtacgttcaccgctacgctttatcctccgttttcaaataccattgagagccgaaaggttgagacatgaaactgacggggattcttttgaaaacagtcagggaaagaagaagagacaacatggcactgaggccgttaaggcacacattgttgccgccaagacggtggccagcattgtcaagtcttctctggtatgacagtcggcaagcaatgaatggacagatatctgactctcgtttccagggtccccgtggtcttgataagattttgatctccgccgatggcgatatcaccgtcaccaatgatggcgcaactattctcggacaggttcgaccctgaagtccttcccccggagagatccaattctggctcgagagactgatgcgatggttacggttagatggagatcacaaacaacgtcgcgaagctgctggttgaactttcccagtctcaggacgaagagatcggtgatggcacgaccggtgtggtggtgctggcagcggccatgcttgaacaagcctcggacctcattgacaaaggcatccaccccatccggatagccgacggatacgatcaggcctgcgaaattgccgttgccgagctcgacagaattagtgacgagattacattcagccaagatgataccaccaacctcctcaaagtggccaagaccagtctgggcagcaagatgtacggattcttagctgtatattagttctatttgatgctgacggtttccatagtgtctccaagtcccacgatcaattcgccaagatcgctgttgatgccgtgctctcggttgctgactttgagcgcaaggatgtcgactttgagttgatcaaggttgacggcaaagtcggtgggtcccttgaggactctctgcttgtccggggtgttattatagacaaagacttctctcacccccagatgcccgacgaagttcggaatgccaaattggccatcttgacctgtccctttgagcctcccaagcccaagaccaagcacaagcttgatatcacatctgttgaggaattcaagaagctgcaggactacgagaaggagaagttcacagaaatgatccagcagctgaaggaatcgggtgccaacctagtcatctgccagtggggtttcgatgatgaggccaaccatcttttactccagaatgacttgcctgccgttcggtgggtcggtgggcctgagattgagttgatcgctattgccacaaacggtcgtattgtgccccgattcgaggatctgacccctgacaagctcggcacagctggtattgtccgcgagatgagcttcggaactacgagggagaagatgctggtgattgaggagtgtgccaacacccgcgcagtaacaattttcgttcgtggaagtaacaagatggtgagtcaaaacctgcaccatacgtagggagatgtgccggtagctaacttctgctacagatcattgatgaggctaagcggtcactacacgatgctctatgcgtcgttcgcaatttggtgcgcgacaaccgtgtcgtctacggtggtggtgctgctgagattgcttgttctatcgccgtcgaggacgccgctgtcaagagccccggcattgagcaatatgccatgcgtgccttcgctgatgcgctagatgccgtgcccttggccctttccgagaactctggtttgagtcccattgagacccttgcctctatcaagtcgcgtcaggtcaaggagaagaacacccgtctcggtgttgactgcatgatgactggcaccaacggtacgcttctagacaaccatttcataccccgtcattttcatcggctaatttgggttctgtagatatgcgtgagcacttcgctattgaccccttgattggcaagcgccagcaacttctgcttgccacccagctgtgccgtatggttcttaaggtactgctcccattaactctttctgtcgcgctcgatgctaaccgtcaatcagatcaacaatgtcattatctctggtgatgatcagtctgagttctagatcactagattctagtcctattccacgatggtaaaagaaaaaaaactgatgattctggtttgctatgtaaaaacatggtcccttacatagaacccttttagtttcaataaaaacgaaaggattgataatgtctctatctggtcactgcttctgaccttgctcttgatatgggcctttatacctacatctcgtagaacgccgcagcccagaacggcatctaattcgaacaatcaacatgagcgccatacgcatacgcaggtgaacatagccatacacctattggtacaacatactcatctcgcccatgaatcccaaataccggtatcatcccttgtgcctcgggttcacaacatgtgaactggaagtccttaccgaaactacagcaatcgcgaaatacataccagtccggtatgtaaaagcaacctaagccatccagccaggagacaggcttgttccgtaggagatccgtgcttccattcgggatcgtgtgggattgtctgtgttcacgagggtcacccgatatgccgaggaacaacaacgtacccataagaagatagacgcactcccaccacaagatcaactgacttattggcttttcggagcctggcttccattccccctcggtgcgcatttgtggggttgccgattttttccgtcatgtttctttcgcaataaggtcttctagactaatggacgaacggacctaagtagctagtgacatgtcccattatggggatatacatcgtgtggttgcccggatacgagagtgaaattctaatgtttgaaatcggcatcaggcagtcgacgtatactttcttttagacagcacctgaagccttgcgtgccaagtttaggtcatgatgggcaatgcgttagctccttggactttgtcattatgtattctcattcccactcacgactgtcctcgggatttatgcgagcgtcagtgctaaatacgactttttctctttccttcctaaataaatccttgtggggcgaagatgagatagtctctgcaggcacagtatagaagcccccactctacgaggtagcctgtacgacaagaagattccgatatcattactaaagagtagttatctacgcgctattcatacctgtagtgtcgttttaatacaagttatacaaattcagaacaagctcattgtcccgaatgtgttgagttgtcgtgacccggggaactacgtcgagaaacaaagtgtcggcctataggacggactggaattgtgaattgaatataaactcgataataatcatagcttaggcaattgacagagcttttctcggaatgacgcccgaatcagaatttgacggtgaaggccgcgtactaagtctcagtcttgataagatatatttatacttctaaaaagtgtagaaaggatgtcattatttccaacatctttcagggcgtagaggaagataaaatattcttttcttttcccggtttcctcctcgagccggtatagtagagctttcaacttcttgtaggctttcagctgttgattccaaggtttcacaatgcatggaagtacaaccccagttccccgcgattcatggaccataggattcggaattttgctagttactacagctcaactgagggcgagacaggcctagactagatctattttctctctttcgtttcacatgtaaactcttgacattgggagctggctatcttaatctggagtgttgaggagatgccctcttatacgtgtgagtttatattgctgagcattgaaaatgatgggtcacttcggtctagacggagaaagagtcaataatctgatatatcgcttagccagaccccatatactcagacacaatagtgccaacagctatccgtcgtattttgaaacaccagctgcgccagaaagccattgaactcgaaatactgtattgcaggacaattccaaagcaaacgaagtaatagtaaatgccgtaaataaagaccttataatgtgggcatattaatatattcataccacagctgcattgaggattcctatacatagcatacacgatttcaatgcatcgcatcccacggcagatcaatttaaagtcccccatgacctgcagcgggtcgtgttttagagtatcttcattggaatatgagaaaccgggcggcagccgccaccacaggagacggacgtcagctccagcatagccgtgggtgagtaccctagggcacaacgtaccctgcttagacagattatgtacttttgtacatggattgggtcgatctgggccgaattaaaatccatcgttgtggtgtgacaccgctgacaggtacgagggcaagccccgatctggcgcccattttcgtggccgggattatattacgtgggacacgcgggtctgggtggttgtgctggcctttctgtctttccttttagtcctcttgtatattgtggatggagagggatggatcaaaggtacgttgctggtcggcgtgggttttttctatattctgtgccctgcgttctcaatacgactggactgggctacgttgcatggtcctgtaggagagtagagaatgtcttatgtatttttttctttttttctctctctcggtagtcgacatagccgcgctatgcttgaagaaaacttctgtcggacatattgtttccgcagttcagatgacccggtactggcagctctatgtggaacaagatgcgagaagtagcatggtccagccagaatcgagacgtcggtaaatatagatgttgactctaaatggcctcggaccgagttaatgtcgcgtcagcctcatcagtgctagaatacgaatcacccaggttgctcacatgagcatcgtggtttgacgtggcttcatttcgttcgtagtagtctagtattgggctcttagacgtgttttatcttcccgtgacagccgtttgatgtaaattgagtatcttcctcggctcctggtgcaccactgccacttcccatatatggtcatttagtgcttcttcggggaatcgttggtctcgtcacacgacgatggacctgttaaccatcggtatatcacaaacccagtgatcgctatagttatccgagtttcatgacaattcgactgccttcttcggtctcaccgatctatagatgcttgcggtctactccgtactaaattttggaaatttggtatagggcacggcatgtattgttcaaggagtgacaacacttttcagaagtctgcattatctttctaattgtttcctttgtctgtaatctatttgcggttcgataggaaatagtgaatggtttgccagtgagtgcgttggccgaaagcggctttccatggtctggggtccccttaatgtggcttccccggattttgatccccgcaaaaggttggggaccttttgtgtatttgatagtttgtagtatggcgggagtcgacatattcattccaaaacataagttctaaaaaaaagtaatggtatccacctatatgccgaatgtgtacggagtactgtaaaaatataccgcccatccgtagctttcagcttgcaacttatcttcaagcctcaacaaaacatgtttgattaggtgtatgtaatagactttatttttagtcgatatctaaatattctgcgacccaacacagctgacggggaagcaggtgacaaacccggatacattggcttgatttcaggaggctccagatcagagcctaacacactgacaggtgcacagcacaaacgaaacataaaaatcggctctaagactttaaacccaacacctggtcagcatctacaatcagcagtgacagaatgccagcacaaacgatcaaagatatcaatcgatcagctggcacatggcgcgctgtcaaagaagccacagtgacaaccgtacaggagaggcttcgttcccaatcaggggttcgactcctggtggcctaggctgcgtgtcgatgaaaccctccatcttaaccaaaatcagcaaccaaagacagcgatctcagcccatcgcccgccacaatcacacgccgagagactccgaaccgagagatctttatacacagccgctacagcccttgtgggcgagaaataaaagcaaagagagctgtcagaagatagccgccctaaagtagccaccggatgcacatggcccgatgtagtcggcttgcattgtgggggttgttattggccaggcaacctaggatcaccacgtatattatctagttgcttacgcgatacaagagtataaaaggaagaaattgtttctcttccataggtaattaaatatatggatcgagactttaagtcaggtggttttgtgaattggactatttctggtgactgttgtctttgattactttgtatctccgaccatcgcaacaagcaaaaagcagttatgaccttttcgggaaaatgaatggtttgggatttgtacttggcatcaggtttcaacaaacatattctgcacaaaaggaattaattgaagatctcgaaacaggggtctggaagagcaaatatgaaattaaccctagtcatgacaggggctgtttgttaccaactcaaataccagtcaggcagaacaagtaaagaaagagaagaccgtaaccaacattcatatgtatttttttctggattgtactccttatgcttcctcagaaacaatttgcaatgacgaggtggcagatgaagtataaagcccgagtatggaaccttgcacaagctgcaacatcaagggaagtgggcccgtaacgttggaaaaatgagaacgacatgccagggctaccgaatatctgggaagatgatctgcagaaaccatagagtggatatattattgggccacaactccaaacaaggggaattgtcgacgatccgggaccaggggccgcgcagacgagatgggctagacctttagatggtatgcatggatgtgcttttcctttgctactttgtgtaggttgaacgagcaacagaaattacgcacatgaccatctgagcccaagctataataatagttagatgagactgcgatattgaagggcaagggatgttataaaaaacaaagacatacacccaattccagaacgatcctcgtctaggatagggatatattgggtgtcacctgttccagtgggatataatattttgaagccgactactccgtatttgcagagagccaaatgtatgaaagaagccgaagacattcagaagaaaatgatcgtcgcggatatgggaatcctgcttccggctggatcgcagaattcagaaacccacatcccatcttcgtctcagctagtttcacggggcctatcagcctcgcggatacagcaagctttcgatctggaagattccctggatatccctagttgaaggtcacatgcattatagataggccgatctttgcagagtagagagaacagggcgaaaggacacgaacgcatcattacgtacttggagtattccgtacctggtagaagaatatcgcaaatgcatgttgttccgcctcacttggtatgaatgtttctagattgagtttatcaactatccacctgactctgtaaatctagaaaactatgtcccgcttcgattccgctgcccgcgagtatcccttgttcgtaccagtcaactcttaaactagcttacatatagacttcttgctcaaagtctcaagtctcaattaatacgtgaccggtctccttttcataattaattaccgattcgaatatatatatcggacactaagatttgatccgagcatagacatttaagccggggaagcgggctacgaatagagtgggagaaattggagggatgtgattcgctgcctcgttgatgtgatacaaagagaacccctcgggccgtctaaaagtcgcgacatatcctatctactactccgtatcatcgctcaattttgcgatctatactccgtatcaacatccaagacaaagagttacgaggccgacacggcggtaattcgtgatcgccttgacctcaaggccatgggaatgaataggagtaaataattgacgatagttaccctcccgtacaccgttatccgctagatgtttggtcattcgagatggtgacaggcaccggctgtcacattggaagagtgactccgttagtttgttgatgcgaagcacgttgattcgggaccagtgacacatttaagcttaatctgtcgattcaaaactacaggttcaaggtccttttaatgattatttgctgtcgaatccctgatagagctctttgttatatctaggtatgatacgatgggaggtgagtcaatatgctgtatgacagtgatactcgcctgataggggatctagatacccctgcggcttcgagtccgtgtagatagattcggaaagctgatagtatttgttttcgtgctagtacctaggtagctcacatcattattgggtcgggcaggtagctgtcatctcaagccgttgcgcgaatcaatgagccaaggactacaatgacaagataagagaactggagatggggcccttttccgtgtcacatgaactaaggtgattggcgattcatcaacatagcccaaagcccaaatctaggagccagtacgagtagatctcaagagaatcagatggtaaaagacggggaagtcacgagcccctgaggtggcgcggttcctggaaccccacatcatgtgacgagacctgcgcgtgactttgccactttatgagctgtccgttcggcttattatgctcatattagacagaatatggtcattatacctggatacgcgagttgcacggcatgcgattgtgggtactgataccccagctcccgaatttgccctatcaacgctatgtggagctattgcaatcctgaagcgcgctccttgttatggcctgcgcttactccgtacatcaggtgccatctgccacggccctaggctcggtctcattccgttttggcgcctccgtctgcccgtgatcatttcatgacaaccatggtattgtacagcgcatataataatgacacatctgagtctgactggttccccatcgcctgcgggaatccgtttagacctcggtaccctggtatcctatgccctggtccaagtggggcgtgaccttccattttcccagtcccaagctattggcagccgcatccttaacgcgatcgctatgcagcgtgcctgcccaggtggtttaatgaggtatcttacgtgcggttccacaataccatctggtaccacctgaatagtagccagtgagacagctggatgtgtagacgagtagatgagtcaagagagatgggttctttcattgcacttcgttgtttctcttatcagattgattgtcgagatgacttccataagccatggacttgctgtgtaagcttcgcagataggaagggggtcagcagctatgaaaaaatcaggttgcataagcccagacaatgtttcgcatcctgtagatgattgtgtagtgtcatacatccgcagggttacgtctgttacgaacgaactgttttgaacgaatcagacgactccggtagtttttgtggtgaaaaaaagtgcacagtgattgactggctgatacctttttgactgggatcttctactaaggaaacgaaatatcaaacgaccttcatagagctattccgatgaaccgattttagactgattttcccatccatatccccgcaaatcttattgaagtctgggtacattttcagagtcttagatgatgacagcttacaaacttctatgtcatatagttaatcataccccgtataatgacagggaataacgacttggtcagatcagttacttatataggtaggagcgattttctcttatagtcagggatctcatggtacaatatcacatgatagatgaaacgtgcgcctggtgcgactttgccctgatcggccttccaggcgcccgggtatagtagggaaagatggttcctttccgccagtccgggcctaagggcaagggttgctgtaagcgttccacccccgtgacagaaaatcttcttacgtattctggcctgctgtcaatccgtttctcttcaaggaaaccaacactacaatgacagctggcagactcgtgacgatgtagcctaggtttgtgacactctcgactgtcgtgtcctatttggatagtcaaagatagaaaatctaactaggatgtgtccattcggaagataagaaaagagaaagggcggtaaggctcactccctgcttcaagtgaagctgtggctgactttctttttttcatccacatgattgaggcctaaagtaatttcctagaatatccctcggaatcctcaccgatgagagatgtgtagataaaatatacctgttttgaaacaaagcaatgcatccaaaacggaaaacgatctactatggaagaggtacgctggttccccggcatgcagcagggcttggaactacactatccctttctcctggataatagctgcttgcgggggaaaaagctggggaataacacagatctcagccggaatcaacaaaaaccaaacagccattagaggaatgaggcgcttataggaaagtgtataatttccaccggaattatttatgtttcaatgtctaactataaccttgagctcatgacaattcatacttccggccatgataggctcgagaatgaacgagcctcaagtcccatatcggtgaccacaacgtggcctgggatcttagaccgatccctagtcttttgtacgcagtgtaccccatagcccgaatgtagagcgtccgtgacgaaaatagcttaaacgcgacatcagtttggcaggtcagcgggaccatcgaccctgtcagcaccaataactagcagtttgacagttcatcagtcagtagacctcttttcttacatacaggagtgaagaatggattgtcagtggcgagaagtaatgtccaacgaccattgagatacatgaagtggcgtagagagagccctggtctggacttcgggacagtcactgcaactaccgcgttggagtgttgccgtctttcgatcagtacattttggcattttctttctattattttatcatttatatattttctttgccccgacaggtcacaggcacttagagcattgatgatttctcattctttgatatgaatgtggaagcagctaccatagttcggctttagcactaaagagattgaaattgaagctttgcagggaaccttgatttcaccgtcggacggttcaatagttaggtaatcagtactccgtggatcgaaacagaaactggtattgacattacagaggtatttttaggaggaaggaaaggaaagtctaaagtcgtggtggaagacggttggaaccatggtaaggtgtatccgaatacatggaacaggtatcgatgtaattcagggccccgtgatgcgatagaattttccccttcaccgaccgttatcctcggcctggagttatttcggccttttagtatttttgaattttggattatctctccccttgtattgtcatgttcttaccaaatattcgcaaaattcttattcttttcttaaaagggaaatattccaattttcgattttcgattttcgattttgattttttgattttcgaatttattaccgtccccctctccttccactccactccacaagtgccgccccccgtcattcttattatcgttccgactccctttctcttcctcttctattctccagatccttctaacagttcacctcactctcccaacctacaatctctctcacacccgtcaatctcgaaggttcatctcaatccggtctctcgataccccctccgtttctccgattcttcgccccggaatctccgcacagtggcgctctgacggaaaactgacggacattcgacaccccatccttcctcttgctttaaaatccaaattctttcacgatccgcatctttcgtgtgagcattcgattgaatcctagacgccaaacccgattgatcgacccttgcaacacatctcagggcccagactcaaatttcaaggcccatccagaaaccggttgattcttacgaactttcaccaccgcatcttaagcgccgtacgaccactatcgggggagacggcgaccccggaaacatcaatcaacgattcctcaatcattacaatcgcttcaactgctagttgaggcatcgcgaaaatgcctttaacgacaccagttctgacggtggacgcggacaatatccataaggtggataccgcgaacgctcaaagtcttcatgggatgtggatgggtaagtgacaattctgctggttgagggataccttgttttgctgacttctcgcgcagtcttttcaaaatgtgccgactacatggaccagggccgtcgacttgaaaatctcagttggcggttgtggacgcgcgaaaccttctgtgtcgaaccggaaaagtctaacagcacttctgccctcccattgctacgatccgaagctgcggatttgcccgaactctccgccagtgtcgagtcggccgcgtctgatcaggccgagcgaatcgaagctcacatcaagcgtcccaagttcaacgactaccgaccggctgtcgttcgagaggactcactagcaagcctaggccgtggaaaggagaagcacatcacatcgttggatttggagcggatggtcctcaacatcaaggaaaagaagcaactgcagcctatgccttctcacgtcgagcctgctgcccccgttgtcgacatcactcctcgcccatccacccctactcctccttccgtctctaccgctcgtcaagttccgaagttttccgtccgaccgaccccatacccccatgagtcgactgagtcttgctcgacgactgcccccgagggcaacgatagcgacactgcacaggtcaacgcgtccgataccagtgtctcatcttctggcattctttctagccggccgcaattggtcaaatctactagcattgttcgtggattctcaccatcacacatctcatcttcatttagatcgcaaccaagattgtctatcgaccctagtccttcccgtgccgctacacaattgaagccgtcggcattgaggaagaagggaggcatgtttacactgggcggctcctctggggatgacgatgaaagctcatttgaggagcgcatggttcctgctcaggagaacgcgaacggtggagggttgaacccgaaaaccagcaacccagaatctacgaaaaagactgcctctttcagcaatcaggtctcgtcccacatcattcctaacttgaaggacatcagtcgatccgacgaagacgccattgagaccgatgatgaagtctcagagagtgcgattgaagatgatgaagattctgattgggaagattcaatcactgaaggtggcgggtctagcgttgacgatcaaggagggatgttccaacgggttgattcccggcccaacctggtctcgcgccgctcgatgcttactatgatgatgcatcaaccggcccgcatgcaaggaaacgcgttccggtccagccccgcacttcaacgctcgcggttgacctcacccagtggtccatctattcctcagtcacctcctgacagggaagaggaaagcttagtcatgcgtggtcctgatgttccccgatcgaagcctattgtcatgaacaccaacgcctcgcagtctatggcacactctccgcgaaccacccgtcgtaacatgcttgctactgaattgacagagtctctccgccgacatcttctctgggaacgccagcagaagagcgcgactgcgaacgctttcctcaagcgtcgccacaccgcccacgacatgaagaacctccaggattaccctggtcccaagggtccacacaagggagttggtccgaaccaggctagtgctgatgcagaccctaattctgccaactttgacctgggcaagaatggctcctggaccaactacaccactgactacggcccctgggagtaccacgtgaagggatggtagttcattcgctgcgatccacctcacctacgcgcttttcgaatttccacggactcgtttgcaacacagcccagcttttctttcttgacacgtacgatcacgatcatgcattgcatatatggcgcaaatctgggattctttttctttctgctttgtttttctcgatctcatcggctccgggggcctggatgtcatcatgacattcactgggcgtttgtcctgcatggaggttatggaacatcaatttcgagggctattttcttcttacgaccttaatatccatgtacagttcatatacctcgtcccttttcgggtcatcaacggttgatggcacatgggtcttgtctctttgcgtctcgctttccaagatatttccgggtggctttttcatgcccggagagttcaccaaaaaaaggtgttttattgctatcatctatctcagcgctgcgtcttttgctgcatgaccatatttgactgcagaaaacgcctagcatttgtttcccactcccgattatcatcggagaggtagtcgttttttttctttctccgcgatacctgataccacaacgtttatgttttccaattcttcatccggcaccgatcttcgcgatcccgccagaacttgtacgctacctgatgacagctaaaaacaaaaaatccaatgaacgaaatcagagaaaacctgtcctcacctgcatgtcgtatttccttgactgcgggcttagatatcagagaagaggcttgcatatgcctggattggcggtctggatctacgtactgtagtagatagctatagctctgctgcagagaggcacggaggctagcagaggtgcgcacagccattcctgcgataacagtgccagaataatcatgtggaaattcagggttaactttgtggcgctgacacgtatgagagatgagtctatcgcataacactgatacctgtctgcatgtacttattcaagtggtcataatccatttggattaaattgcctaactacgtgggttaaacgatacttgactgtatatatacttattcataatagcttatactgggtacatctacaagtgccgtatgttgtactccccataaccaagaaaatcagtgttgatctacaatcacacccggaggcatccacataggaaacgatagagttacactcctttatgaatcaaatcatcgcatatcccttaatgcggtaccacctgcctagacaggtatttataagagtttagccatggattcatgaatggacgtttcagtgcgaatctccgccgatcccagggcgccaaaaataataaaggtcaggtgggatgcagaaaaaaaaaatcaatacaggggtcagtcaaaaagcaccgcacctaatatcccagggcccgttcggaatcttgaaaaagatgccaaaagtacctatctttcccgagaagcgaacagttcgcgcagatctagaacacagaccagaaactcggatttcttttctaattatggatttgaccatatgtcatatcacggtcttctaaccctgaaaggtcgtgatgttgatatttgatattacaagctaatttaaccccgtacagccccgaagtctttaccgaagagaagtgtccatagccgttccataaccataaccgacccgatcgaccggcgagatccctcggtgcaatcctctttattcggcctcgcattggccctggcacatacgagaagctatgtcatctttgcattagtttacgccagagctcccgcggcagtcgggaggtggtgggcttgcaatcgactcgacaacttaagtactcagtccgcggtggctttctcgccctgcatgttccgcagggccagctcctcggaggacccgggggtgagggtgattggattgggcttgcactgagtggctggcaaggtgagttctaggcctgttgatacttgtatacttttgagatttgtatcttccctgcttttgcgttgaatccggggggcttactcaggcgtggggttgtgctaccggtactccgcacgacgtacaaactactacctactgtcaggagggaatcacgttccgctggacggcctcattatgacaccatgagtaattgtgattgtaatctacatggagatcttttacatggatcttgcctgggttatgcatgttttcatcatgattttgccttcgcttacattttgccatgtcttactggcagtagttgcctgaaggatgaagattgacgtgtagatcttgactaattatcacgttgatgtcattgttggcataattgcgtttccatgtgctttctcggttggatttgcttattcccatgaagagatgtgtgaggcctcgagatgtgtcagagggtaaatcagagtggcgtgcaatgccaatagaaggagccttatggggtatacatcgtaacccttagtatgggggtttaccgggtgtccacagtcgtcatgtggtagctgcacatgaccggtgcacatgatccgggggtggagccgctggattttgacacccgagatctatttctatgtgttatgtcgtacgtgtcttgacctcacgtcgactatcttccacgtctcatctcgtctttaaacaataccaatagacacttatttgacctaacattgtctaacctacgtggtagtccaagtcccgtcccagcaaatgacgtatgtacaactcccttctccaactttgaactgatgtggggatgaagactttttcttcctaaaactcccgacatcatctccattctaggaacgtccccagtctgtccggtcatatccgagccgtggggctccaatacatagaaccattcactgccggagaaacaaaggagaaacaagcatctgacatccaaacgaagccaataacatggatataacagatctcatgttctctgtactcactgaggaaaagcaatattgactcaatatagcccagatcaatacttttatcccaagcccctttcttccatgctgatccaatgacaatgaatcattcaaggtgaaacaagagcctcctctagaaccatcaccaaatctctatacattgcgttcgcattccagcctccatctctagaatccacctgcccagttagggctaactcctccctttcccggccagaagagtctttcttcatcttagcttcatacagcaaagtgggtatcacggtggatcactccgaaccagggacaggcaggattcgctgtctcctttttcaccggtactgaaagtttctaattgacgccgcacggagtacacgcatgacaacttcggctccgcatttcctatttggggcttaatacaacttgttacatacatatgttatgggtaccgcgtaccaacccccacggacccctccacgatcagggcttcaagaagaggcgtcgttggaagaaaaagtggatgtcgcctgcttgctgtacgattgacgaattgacgcctaactggctcatcgggttggtgatgtgcgcccgacgtgcaatcggcaagccgatgcagctgcagcatatccccgaaagctacgatatgcgaggatgcaaggatatcgcgctcgtgagctcgaaatagggcgtcttttcggtgttcaaggatcgagggcacttcgcatgcagctttgatcgctttgtccaggctcttcgatgattgaggcgaattcaagacgcgcaagagtctccgttgatttcttcttgatcgtcctccgctatgaagtgatcggccagccaggacccatacaaaccctgtctaggcctctcgagctctagaacagagccgatccttgctttggcgcggttttattttaagagttggactagctacgctttgcagaattcttgttattcaattcaggggacatatcgaaaatttaagtattagtgcggcaagattcatatcagctgttccaaatcacttcacgacatttgccactacaacatatgcacaacataccacgtttcgtggctgttccgaatgatattaatattcggcgaaatcccgaatgaggcgatcgggattggcccccgcctgttttccctgggccaagaaagtcgacattcacactgaatctgcaaatctcaacacaattacagcacctgtgattggcctgaattattattctaggccctccggtggagacgaatcacgtgtatcagctatgtattccaggagctctgtactccgaaaccccgcaagatcaatatcttgaattgctgccatattgagagaatcaaatagtactacttgtattaattgtattaaacttcaaggaggtatcatatatcccgcaaggcatatcaatatatagaaatgccgacatgagctcaacctcgaaagctgcaagctatgtccatggtcaaacgcgccaacgcccatggaagaccgagcgcgatttggaaggcttctggaaggacgatccggttggccgatgaattccaggtccgattcgcgcttttccgctttcggtgtttatttacggtattgtattcgtctcttacattaccatatttgtacagcggaagcccagtaccgcggagcggagctcccttaccgatgcattgaccgaggctcaacccaagtacggagtatccatggatgttctcggtatattgtactttgtatccttgtagcttgatgaggagtttctgatggaacattttttatcttcttttaagcagcttatcttattttaaatttacagctggcaattagggctatacatctaagacagaactatatcttgtaactccccgagggtttgggctcgatatcagtgggatcttgtcttactagcggtagccacagggcttatgcatagaatataacattagaggtcccactgtacatccgagtgacctccaggtagcctcgccaaaaccatttacgccacagctattattgtgtgggatttcagagttcctccatattaaagtgggatcatcttagtatcactatgcactgtccaattttttgggggcttggctccactccctagcttttcgaaggtcgctttgctcttaccttattaggtacgcaggcatggacatggtcccgaaaagaaaccaagatacatagccgttatatctagtggatcgatgttgcatcccggttaaacgcgtaccctagcaccccatcgcgcaggatggagttctagaaactcgaaagcgaacccctcatctccgcgcatcgcggaccgaccgctatccgtgactggtggccgttgaacatagtgcgctgagcttgttgcgcccgtcgggtcgtattccgctctcggtgatgtttatctttttctctcctcgcatggcctcgccggggctgggtccttgttaaggggatatcccccggcatggatgtgggagataaggcgggtgccgcgctctgcgtggtatatgctctgctggcagatgaaattcggaatcatgtttccctcttcgctctttttcgaatagcttttgtttcatgtattctacatgcattggtgatgtgcaggaagattattgccaatcaatgctagtacttggttggttttggcttcctgttgtggcctcgagcagatgatgtgctttaagacctgcacgccacagcattaggttgggatttggatgtgaaatgacgaaaactactttatatagttgagatgaaattcaatgtgaggaccatgcaatgactatcattaagatttgtgagcctgcacttgtacattgtacaacatacgatgaaggcattagtgaggactggagctggatagggagagtccatattagaacatccccgaacatttggagatcttcaactagaaacctccatccacctgggcaaatcgattcattgtgactcacagctcacagtatgactggaaatgagtgaatgtcaaggcgaatgagatcatcggttccgcctgaagtcttggcattcgactgccagtaaaactgtaaacaactataacttcttgtatagcttcatatcttcagaccttaagataactaccactgcttatttgtgaccactttgacattcgacgtcacgtggctgtatctcttcacagttttccttccgttttatttttgcttagtgccgtgacttcaaatatcgctacaagagttcagacggtcgcacacctcggcttacttactgtgcagatctggtcctgtcgatctcctcaaggtcacccgatctctgcgttggcagcgcgcgtcacctccaacttccaagtcgcccagaacccggccattccattctggatcatctctcgcaacacggctcgaggctcagtttcagtatggagaataggtcatttgacgaggcgggtccaacatcccaaggtatgtcaaagcaaaattctattattggctcctaaaagccatctcgccggaagcttttctcccaatcaattctacgagatctacttgggcggattcactggctctcgtattttcagcccccctgttgcatgtccatgcaccacatgttgcatccgccacaaagcctatcagttcccatgttattttctccgaaggctttgttggcgtgcagggtggccccggtctgccaatatgcctggatcggagtcggccgcccgcaaccctttgtgatcacacgctcatgatacttttgttcaataggtacagcgctgccatcctctttgataagtgatgagttgtcagcggtccggtcgcatggcgttgcatcccccgatgaaacgagtgctgctcgccagtcatcgacccagcggaagaaatgtcgctttttcaaaaccaaaaagggtaagtctacattctgagtttctgtctgtaaaggatatttgcctgttttttccctatgcaattatcagcgcgtcattgaatatggacttgagtgccacaaacaagatcctgtacgcaggatcacccaaaggggcacttataccgaggctatgaccagaattgcacgattgatctgtgccccaatcctttgcgcatgtattctcggtgcttgtcatttgataagagggtgatgttttgttcagattatatgctaacattgctcaaggatgccgaattggagcagcatgtccgtatttacatgatgtctcggccattgagaataagcaggcaccagccatttccccgggaaatgaaagccagacttcggcacaagccattgtcactggggtcgagaaactgagcattgcgaaccagtcgaagcaggcctctgccgcagctcctgtccagccccaaagaccggtttcgaaattggagcagtcagacccaagagagtttcagatcaaccaattgaggcggcgttaccgtccacaggaagtcaatgatactcaaggttctactttaacctttggcttggtaccttctgatccggacttcccgttcgagcttgaaagactccaatgtgtccttcatgtcccaagctcatacccgaaggggcggcccacgcttgcagtgaccaattctgaaatggaagcggcgtatcaagaaaatgtcgtcagaggtttcaatgatattgtcgattttacataccgcaccaatggccgaggaactcttttgggttggctgaacagtctggacaaaaagctcgaatcactgctaaccacactggagcgggggccgacactgaagtttttcgctaacgttggtgatgtatccacgactaaagaacctgccaaggccccggagaagactttaacccagccaggatcgtctcaagatcatggtagaacgccgagtggtgctgctaaaccaacaccacagccacgaactgtagtaagtagacacacagccgaagcaaaagctacagccgagaagagacgagcaaccgagacaaaacagctcgaggcgcgccttggaagactgccgatgtatcaaaaactgcaagatggcaggacatacgttattccactccagtcaactaaaaaggatcgcctgccacgaacacttcaagcgctcaagactgtgaaattgattgtgccacaactctacccactcgaacacagctcgatcaagttgcaaggagtcgaaggccccgaagtgaaggccacagaagtgggatttactcagtgggtagaacagacttcgcagctgagtctggtatctcaagtcaattatctggcaagcaatatccataagttcgctgaaacacccttaccagagcaggtgtccgcggaggatatgcctctgactgttgaagaagacgaggatgaggttgtggaagagcctacaaaggcacctgccgtgccctcaacccaagataatgaagacaagccacatcttgttgtcattccacggccacccgaatggtcggttcctaatcccaacagtggcgccgacgggacatcgggtgagtcgagtcacgaggaagacgagtattcagatgaagaggaagacgaagaaggtggtgcacccgttcccgcatcagtggacaacaacgcacccggacgaggcatcgcactttccttcccattcttagagctctacggaattgagcttctggaactcacgagcctcaatattacaatcaaatgtgaccgatgtaaggtggcggtcgacatcaagaacgtgccacaaattaccgatgagaagggccagatgccaaaaatggagtcgtgcaggaaatgtgctaataatatgagcgttggtgagtacaatcaacctcattctcctttctgtgatgggttgctgactttcgtgtgcagcattccggaggcagttgatgcattctcatgccaatcgtgctggctaccttgacttgggcgggtgtacgattggggacatgctccttaggttggttcttgcaacatcatcaaagtgctattttttaacccatctcgctatagcgacttcatcccaacttgctccgagtgctcgacgccccatccggcaccgggtatacctgcagttcgcggcgagagtgccatgggtacatgtcgcgagtgtcatcgcaaaatgggtaggttatgatatgcagtgtccgttgtttggctactaacatatccaactttagtgttcaagatcccggaggtaaaattccttctagtggggaatgcagcaggtaagtcccgatatatcgagcccacaggagacgctttttactcattgctgtatcatctagtcacttctcgtggagccctccctcccaagagaaaggttcgtataatctacagcgtgtatcatcatgataaaatctaacaattatctcagcctcaggaagtcctcggtattgtcgcaggacaagaacttccgcgtcgtggtcgttgccagcactacgccaagagtcaacgctggttcaggtatgtggtcccctatccatgagttggtagcactcgaaaaataggttatactgacccctgtacagattcagctgctgctcaaaggttttcccttgtgacaagtatggtttcctactaaatgcatctccatcttttttcaagtgcttattgatttacctagatgccacgatgcggaaaccgaccacccgaacgaacacgcaaatcgtatgatatgtggctactgctcccgcgagcaaatctacaggcctgagaactgcggtatttgcaaagcagtcttgattggaaaggcaggtagtgggttctgggagggcggaaaaggaacgagaaatcggactctaatgagtcggaaaggtatgtctctcatatcaaacttcctgcgagtgcactcatctaatggggctctagatccgaggaaattcaagcggattggagccaatgctcccacttcgagttcatcgaagcggaagtaaatgaatgaaaacgtgattaagactattgtatatctcaatatatcaagtacaatagtttatttcaatcttaaaaaaccctttcctaacctaagtagcgaaaacctaaacagagcattagtgtctcatcattaatgtcaaatctcatcctcacctgatcttcttgttactcactaattactcgcacaatcaaatccatcagaccaaaatgtccgcgatactgtactcgctagaagccgccacctgcgttgctatatgggtgatactattgataatgagcggcgctgctataggtctttgtcctgatccagatacacctgccccgctttcatcgctaagaggaatcccaagccaatacggtacagatatattcagagccaccgaatcataaaataaagaataagtcggtgcaaacacagaaaaaatgcctcgatgataaggaacgtttgcttgatgaatcaagggccatattcaagcggaaaacatacttgatagagcggcttcaacttcgggaagaccgaatggcaaagggcgacattggtgctgctggaccatatccaaatagtacggcaagacatctctatgagcttcagttcaagattcgacagatttggcgtgagcttgcggacttgctggatcgatattgcgactgaggttggacttggaggtcaacgggggattactggatgatcggagttgctattaagaatggggttcgagacagtggtaggagcaataagttacttctgattgctcggttgatctagagtagagtaggtatctgttcttttaagaatccagatttgcttcattcaaatcgcttgtttcgcctgttacttcccctaaagtatctcagctggaggagcaatatgacgctgatggcctccatcaagtacagcaaattggaaattcttttgcagccttttatacaacacatatggcaccatctctcctcgagctgcaagctaccaatcaccactgggaagccggagtgcacaaaagcggacatcccatatctcgacttgaattacgaaacatcggcagaccatgacatgcttcagaaatattatattaaagtgaaagttcccatttcgctaaatacaagatttatgcccccaaactgcaagaactcatagaaaaaatgcccgactatacgaattcttttgtcctcaaaccaagttaccgcggagttcctgctctcgttcgatggcctcaaataacgacttgaagttaccggctccgaagccttcgaagttgtgtcgctggataatctcaatgaacacagtgggccgatccatcatgtgctatttgtttagttagtataaatccacgaatacttgagtcgttagtttccacataccttagtgaatagctgcagcagatagccaccctcatcgaaatcaatcaaaatatccaagctgcggatggtctcgaagctttccttgagtactatgccagactgcttcaagcgggcctgcatatctgtgtaatatgtctcaggtaccttgatgaactcgacaccacgtgctttgaggttggtgatgtcacggataatatcgtcggtatgaagcgcaatatgctgtacaccggcaccgttgtagaagtcaacgtattcctcgatctgggattgctttttgccctttgctggctcgttgatgggcatcttgacgatctcgttgggcgaggccatgaccacactactcaaagctgagaattcactataattagaaggttagtcatggttcttggagatcagctaaaatatattataacactcacgtgcagatttcgttgtcgtcgacggaccagaaacggtggaagccaagggccttctcgtagctaaccagtggtattagtaattgaggcctaatcaaacaatctaggcgaaacttactattcacagatcttatccatctcattccagtcctgatttccaacacagtgatcgatacgcttgagatgaacaccaggcaagaactgcaaaatgggatcctcgttaccagtctcagcacggtagcctggcatgaagataccgcggtactcgctgcgctcaataagagtatgggtggtctgcccgtaagtctggatagtagcagtcttaacatggccactcttatcttcaagaaccttagggttagagacagccttggcaccattcttcacggcagcaaagaagacagcatcgacgttgtcaacctcaaaggcaacatcttttactgcatcaccgtgcttctcgaggtggtcatggatctcctttagctcggcttgttcttcggaattgaaacggtcaatttggtcaagggaccgcagaggggaggtcaggacgaaggtgatatcgccgttgcggatgacatgagagcagatattgcggcttccagtttcaaggcccttgtaggctatacgtttgaagcccatgcgggtgatgtagtagcttgcggcctgcttggcattgccaacgtaccagtggacatggtcgtaaccacgatagctggccactgaagatgcctcgtcgacaactgaggggggaggactattggaaatagctgaaggagccattttgctgaatctattatgtttgtatgatggtgatattgggggaaaacgtagaaagatggtagtacaagatgagaggcggggaattcgagttgaagttaaatattcggttcctttgatttcaaatagctggtcctccagtagccgcaagtcatctcggcagatatcttcttcagtccacttttgttactttacacttagacgccttgtcatagctcccggccgcacggctatttcaggaccctgaaatatccggagatacccgggcccgctgagatcatcgtcaatatccgcctggagatcgatttcttagattcacaattcttgaaagattttattttcttcttcaattattgtgcatagaaccgattgcagattgagtctcacaatagcccacaattcctcgcctcaacaccaaatcccaagatgacatctatcgcaactgctcgcccatcattgacatctaatgattccgctgtcctacaagctctatttgacgccgaatcctccccctcatcgggagtcaccattgatgcatcccttgcttcatggccatcatctctgaacatccccgaaacagacttggcatcgctcaagcagcgcgaaacagacatcatccgcaagctgcaatcaaacaaatcacctagtatagagacagtccagtcagcactaaacgacttcgacactctactcacccagcatccaacatatccctccgcatacacaaaccgagcacaaacactccgcctgctggtcgatctgatctacatcccagaagcgggtagtgatcaaagcactcacaccgaggtggccgatgctgccctctttgctcctaaaacctcccagctttgctcccgcatcttctctgacctaggccaagccataacctttgccacaccagcctccccggctgatgcggtctcaacaactcaggcacggctattggctgatgcacacacgcatcggggatacctgcttctcaaagcggcgcgcgtgaagaaggctggttctggtgatgataagacaggcccagagcgcctgcgtggtctttcggctgatcagcttgaagaaatggccagtcgggatttcttcgttgggggtcgctatggaaataaggttgcgcagcagctttctgtgcagacgaatccctatgctaagatgtgtggggctattgttaaagaagcgatgaggaaggagcttgaggagtgaagattatttagcctgaagaaataatttaatttgcgaagttggtatatgaaataatgaagcaataaggaaaacctattttgatagatttgattgaatgctggtatcttcttatgctacagaaataagaggaaatgtgcacattttctcttcgcagtgctcaggcccaaaccatagcttatgcctttttgttggggttcacaaagtgccgcttgagaggcttccagctgtgctcgttgtattctggctgcaccttctcgcaggtcttaagaccccactccgagacgccgaccatgtgagtactaattattgtcagcaaatatgaagtctcggaaatgatagcggaaatcgaacgaacctttcgaacataaaagccatacttccatcaccaaccttttgaggcttcagttcagcattgctagctccctcaaaagcacccgagtccggaccatgagcgctcatgacgttgtgcaaactagcaccagcaggcctgaaacctccgccgaccttcgcatcgtagtcaccggaaattagacccatgaactccgacatggtgttacggtgataccaaggtgggcggaaagtaccctctgcgacgagccagcgaggagggaagataacaaagtcagcaacggcggtaccaacatggtccgacggagctgtcagcacagtgaatatagaagggtcggggtggtcgaatgagatcgaaccgataacattgaatcggccgagatcgtatttgaaggggtagtagttgccgtgccaggcgacaatatcgaaaggggtgtggttctgtcgcgcggcgaagagcgtgttgttgaatttgctgtaaagcttgtactcgctttcctcttcatcgtcgaaagaggcaacgggggcttggaaatcgcgtgcgttggccaggcagttagatccaatggggcccaactctgggagctggtagtggccctggtataattcacagatgtatccccggacagggccgtctgggagcgtcactcggtatctgatgggagtgattagctgttgatcgtatagcggatatggaaagacacccacctaacaccgcgagggataacgcagatttcatttggtcgcaaaataatgcgaccgagctcagtctggatgtccagcacaccgtgctgaggcacgattaggaagtctccatccgcggagtaaaaagcttccttccccatgtccttgcccgcggcatacattaaaatacccagtccttgcttctgggttgggtctccggaccctgcaatcaggtgcagtccatgtacccagtcaaccttctcatctaaatcgaaggggttccatcgcagctggttagggatgtggtgaagcttatcggtctcagtcgtcatcctcgtatgatacgagtcggcatcctccgcggtgaagttctcatgagctgccgcgggtagaatccgatacacccatgtctgcttattctcatggcggggtgcagtgaatgccgttcccgagagcttctcggcgtagagtccatatggagctttctgcggggaattttgaccgattggtagagctccttcgatggcttccgtcctatttactcattaattttgggttcattcgttttcatccgtgttgactatgtgtatacatactcgtgatacgagtcgaagcccgtctggtatttatagggatcagggtggttgaacttagtgacaggcatattggcagtgatttttgatgttggatgatgcagaccttgtcttttcatatattccagatcaaccgagggtctcctttcaaaagaagcaattaatgtgaggtcacaccgttccgcggaaatctgagaattcccgcgattatcctcattccgcatcggttgaatgcggggggagcggaccagttccgccctaccttcgaggggctaaacatcatagtcaggtagttaaggcccgtcgctttctctttctttgaacttcttcacacattacatccatcatggcttcgtggtttcagattcccaagaactcgccgttctcgctcgccaacatcccgttcggcatcatctcaacacaatccacatcaaaggccgctgcgattgcaattggtgatcatgcattgaacttgagcacatttgcttcatctggaggcttctcacagcttccagctatcgagcagcacctagctgttttcagccaaccgacactgaatgacttcgctgcgcttgggcgccctgtgcaccgacaggtgcgcgagtatctacaagacgtattccgcgccgacacaaagttcccacaggtcctcaaggacaatgcctcccttcaacagtcagctctgctgcctttgtctaaggtcaccaaccatgttcctatgcaaattggcgactataccgacttctacgctggtctgaaccacgcctacaacattggtgtccttttccgtgggccggccaatgcactccagcctaactataagcacctgcccgttgcctaccacggccgtgcctcatcagtcgtggcttcaggaacacccctccaccgtccccagggtcagatcctggcgaaccccgccgcggaccccaaggtgcctactttctctccttgcaagaagctcgacatcgagctggaacttgcttgctttatcagcaagcccaatgatcttggcaagcccgtcccgattgatgaggccgaggatcacattttcggtctagttctcatgaacgactggtctgcccgtgacattcaggcctgggaatacgtccctctcggccccttcaatgcgaagaacttcggtaccaccatcaccccctgggtggttctgcttgatgcgctcgagcctttccgcgctgccggtttggagcctgcaaaccgggagtctctgctcccctacctgcgcgagaagcgcgccgagagtgcctacgagattcccctcgatgttgaggttaccaaccccggtggtcagcccactattatctctaagagcaacgctcgcaacctgctctattctttccctcagatggttgcccaccacactatcacaggctgcaacttgcgcaccggtgacttgttgggatcgggtactatctctggtaaagaggccaagactgagggtagtttcttggaacagactaacggcaagactcctcttaagctggcggatggctccgagcgtatgttccttgaggatggtgacactgttattctgcgcggtatggctggcacagaaggcaactatgtcggctttggcgactgtgttggcactatcttgcctgccatttccctgcagtaaatgacttatataaaaaatcgaattgaaattcgatgaccaatgtttgatgtttcatttctattgtttacttctacactatagaccttggaatggatggatgatcgcccgctatactcttgtcaaatgtcattaaacgtcagtaccagtacgacgatgggatattctagcccggactagctaacccactatttacaatgctctcagctattccttaatacgaaactcatcgggggtatcgccctgtgatctccaatgccccttcttaaccgcctcttccatctccaagttcttcacaatctcattcgtaaccgggaattgacccaggtcaacaccaaaccgctgagctccccaggcagcaggaatcaagcacaaatccgcaatggtaatggaatctccaacgctaaacttccccgccgatttcttaacaacagcttcgtaaaccctaaagccatcctccatcaaatcctttgcccaatcagcacgttcagcccccagctgtccaacccgcttgagaatcctcaagttcgtaacaggttgtatatcgcaggagataatgtccgccaacgtgcgcactgccgcgcgggtctctggatccgaggctggggggagcaaggcgggcccttgctctgggaaggcttcctcgaggtactcaagtgcagccagagattgcgtgattgtaattggcgcttttgagtcgtgctggattactagggctggcactgttcctgaggggttgatggccagatgggctggggaggattgctcgccctttaggagattcacgtagacgggcgtgaaaggaacttgcttcaagtacagggctatccggagcctggcagagcaggaggagcggaaataggtgtggagagtgactgtgtcggtcattgtggctgaagggttggtgatattcgaactatgagatattggagtagcgataaaggtacgaaaagagcctcgggagaaggccttatgtgcttataagccaagctactcaattttaactacctgggtgtcaagtcactttccccaagacgcggatcttgtgtgccgttaccttgtccaggtggactcccttgaacatgtagggtatttggtgcggaacatattccgtcattttgaagccgagctcaagcgctgtattttatacatttcggctatgcctccgggagatatccagggtacatcatacttataatgcacatggtacttctaaatcgtattagaaccccgcgggcttgcagctttgatattctgcatggcatatatctgcgatttcttcccattattggctcttgaccgtccagcacggggcaacatcaccaatcaacttcaggataaaggacaatatgattttatccataaagtctgtccaatagacaacacactatttgtctatgttgtacggagtagattaattatcacctctagttagtgtgaaaggtccgatcctaatatggacagctatgtgcgggccggccgacggatatcgccggctaataatcctggcccaaccgcatcactttgtctccttgcagttatccatagcatcaccaaatacccacagaatccacttcagcaccgagaccctggttaatccgcccaggaacggttgacgatggatggtgtcaggtcagcccgcccggacaagccgtatcaacgcacctacaaggcgtgtatcccttgccggcaacggaaggccaaatgcgacctaggaactgacccaggtggtcttccgatcggcccaccatgtgcgcgctgcagaagggaactaagggagtgtgtgttccccgagaaacgggcgtgggaaagatcccgcaaacgaggtgcgctagaattaaatgcttaccatatataaattggctggtttctgaatggtcaatctctagcgcgatcaccagagagctatgaaactgatgtatcaccccgacacgccacgcaacttacgaagtcgcccgatagttctatccccgtacaaggacggacacagaacctgcaccatacaagcgacgtagctaacttaacgcccgagacaaactttcagaagccgcctggctttcagtcgggatggccatatcatcggggtcaagcggggtctcatcatggctctctcgatcacccttccgtagggccttcaaggactgaccagtccccttctcatacatatgaaaataacacgcaccgggcgaattccaccctcgcgagctctatgatgcgcactgtcgttacaagtggaaatgatgcactcaatattctcttcgaggctgcaactgctcaagaagatcatagtcctgatactgggtccgaatcactagccgggcctccatcggcaggtccgagtacccaaggtcgaacacccggaaactacgattccgcgtttgagtcggtggcccgaataatacgtcccgtcaagctatcagacgcaacacaagacactctcaatgtctgggaggcttgtcggtttgtcaagatgggctggttcactgctagagaggctgttacttttgttgatctgttagttctctcgcaagctccatgtctctgcgaaataacagctaacccgatataggttctataagaatatgtcatgtttgtctccgattctaactgatttttacgccaaccatcgatatcattactggctgattagtcgggagccagtgctatgctccaccattctcatgatctcttctcgctaccacgtccttcctggagcagggggagagtcaagaaatttctttatccatcaccgcctatggtcacattgccagaaattgacgatgcggctaatattcgggcaagagaagtcaacaaaatccaaagtgcgaagtcttggtactgtggaggcacttctgttgatgtcagaatggcatcctcgcgccctgcattttccgcccgagacggatggctgggacgatgatttgatccccgaagcccccaggacccatgacaataacgattcaaatccagcacctggcaatcgcggggtggaagacataattgagccagcacgccgatctgaccaaatgtcctggatgttgcttgggtgtgcgctctccctcggacacgagctgggcatattcgagccagaaggaagcatcccaccagccaacgaaccggaatggaaagatcagatggcaattcgttggcagcgcgtgcaacgtctgctatacgtctacattaatcaattggcttggcggatcggatgcatgtcaccgattcctcaatcattaacccatgctatactgggcgggcggaagccgcaaggattgagtccgccgggcagcacatggttgacgttcatggattcgtggattgagcttaccaagctagcaaagtctgtcactgatatgttcttcccctctgccgcttttgcacgccagcaactgcacagcggccgatacgttggtcttcttgaacatttccgacctctcctcaaccagtggaaagacaagtacctgcagcctcaggtgcttgataaagcattctacaacgatctattcatcgaataccatttcgtccgcgtctacacccattcagtgggaatgcaagcagtagttgagcgtgctgtcgcagagaacgaccccaacaattttgacggagtgcgacccatgaccatcgactcaacagactacgaatacatccaagaggtgattgatggatgtggccagatcctgcaaaaagtcacccatttggccgaggcaggggcgctacggttctctccagttcgaattgttcttcgcataactagtgcttcgatattcctgatgaaagcgctcagtctgggcacacggcaggccaagctccaggaatcaattgaaatattagaaaagagcatcaaagcactcaagtcgaatgctttagatgatgtgcatctgagcacgcgatatgccgcgctgctagacatgcacgtatcgcgcttgcgacggaatctgctcgcatcgtcgaaagtcgcgaaaggtcgagacgctccgcgaagttcacccatggggccccctccttggccggaaactggtgaccggtcaaatcccataaacacccctgtattgcagggctcaccaccggatatgggatttatcccgtccttgaatgatattggtgcagataactggctttcgttgccattcgacccatcgatggcgccgtttgatatgacccatggatgtcaatttccgatgtatgaaggtggagcattagactttatctggaatttgccatcttgatagagtccgctctgtacacagagtattcaattagatagctttgtaaatagctctgtatggtcgcaatcacgcgatgttgataatgataccccagttcggacaatgttactccgctttatatttccccgcaccaaacacaaccaacgtcagaatttcaaccagcgtaattacccagcaagatgtcgaaaccagcgtcatttaaacctacccttatcatccacggcggcgccggaaatatccaacgctccaaactccccccagacctctacgccgcccaccacgcatcgctccaatcctatctccgctctacacacaccctcctcaaaaatggcagcacagctctggatgctgccgtccacgccgtctcgctcctcgaagacgaccctctcttcaactgcggccgcggcagcgtcttcacaacagccggcacaatcgaaatggaagcctcagtaatggtgacatccgtgcaccaatacgacgtaacacaaccaggcgcaatcaagcgcggcgcgggcgtgatgggtgtccgtaatgtgcgtcatccaatccgcctggcgcgcgaatcgcttctcagatcgggtgtcgccgctgatgggtctcctgtaaatgatggagggagtatgcattctcagctggttggtccctatgttgagactcttgctcgggattgggggctggacttttgtcccgatgagtggttctttacgcagaagcgatgggatgagcatatgaggggattgaagggggaggaggagcctgtttcgctgactcaggggactgtgggttgtgtctgtcttgatcagtgggggaatctggctgttgccactagtaccggtggtttgacgaacaagttacccgggagaattggcgatacgcctacattgggggctgggttctgggctgaggcttgggatgagctcgtctcaggtgttggtgaggcagtattggaagattcttcggtgggtggcttgctacgtgaagcgaggaattggctcggtgattgcatgccaccgttcttacgaaatcagactttacctatttattcgtctctctcgggtgatgatgcctctcagctggacttggggcctgagaaggcatgtcgtccctatcaatcatctgctcagtcctctcgtcgacgggccattgcgctttctgggactggaaatggagactcgttccttcgggttgctgctgcgcgtacggctgctgcaatgctacggttctcttcgcccggtagcttcccttctggccttgcagatactgtgacggctgtttctgggcctggtggtgaacttcaacgttccgctggttccaggtggaagaagactggcgagggcgaaggaggtattataggtatagaggcagagcttgcccctgtaaatagggcatcggatgccaaactacatcggggtaaggttgtatttgacttcaattgtggtggtatgtggcgtgcttgggtagaggaagatgcttctggcaacgacgtcgagaggattatggtcttccgagagcaatatcaatagaagagcttgagttcattggtactttatatgtcaagaatataccatctagatttgttccctactgttcctacgagtatatttgaaaggtacaaaaatgctatgcaataccaaaaggtcttttgtcaggaccacacctatttcctatgccaggaagtattccggtgtgaaagtatcggcggacatttttggctatacatgtcgaaccgggcgaataggtacagtgctatgacatatagcctcagtaaaagtaaaagtacaggaggaaaagagacgctcgaagcaatgtacttacacccgcagaatcttgttcgaggacaacggagccggagaacttggctgccattttgtacgcgccaaatatgagcagttagacattgacctagaattattcagggcgcatacttcctaagtggagtagctggatccaaggtattttcaatccatagaatagggtgggccgggctcccgctaataggtcctagaaatggtcagatagatatcgggagaaaaaattgaaaatacccaataccctcgtatctccatttcggtcgagttttctatccccagcaaggtattggaaaagaggcccagatgtcggccatccatctgctctggctcttcaagacttggtaatagttttgttgagcgacgcgagagtcttatcaagagtgtccctcgttctttcgacggtgttgccagctgcaaatgagcatttctcgggcccagcctgatagcagatttcaaagaattcctcgatgatcttatcggtgtccacaacattcgcggtccagtaaccagagtacatactctgcgaatcacatacgcttaacacgatgagggtacatagctgcaaaggtcgcccccaagaccgtaccgtaggaaaatccccagtactgcagaagctctgcgccttgtttccatcgggttgccttgtgaattgcctgcctctggacctcgggaagggtcaacttgctggcaataatggcattggccatgttttctcgccattctccaggtcgctcgataatcgcaacgatatctgtcactgttggtgtagtattcatgaatcgccccatctttgggccgtctttgcgtgtacatgtggcgcctaacgccatggctcttccccaggcttgttctgttgccacggtcgagctgcctaacagatcgagaaattcattgtctagagatcatcgctgacgagaatgtggatctgtaaagcactcgtatcgtggagtagtactgttaatgccacggagatcaaatccgataatgtcatagtacttgtcttctgctgtctagggagccttggaaacttcccgtaagtttatgtctttacatggtaatttacctaggaattggaacagaatcgtactcactttaacagataaagacgtagcttgagagtcaactattttctggaggtgtttcccttgtgtcaggatcatattgacgcccgattcacccggccctcctaaaattaattagcttaatatttgtaggaattctctgtcgaacttgcctgggttgaccagaatagctcctccatatctggggtctgttactgatactacagcagggagtttgattattgcaagagcaaccttctcttcgccattatttgtgctgttccaatccatcggtacctagagacgggcgcattggtagctatcgaagcacggagtatatgagagtttttccgacggaatgatctagtgataatgtgatgagcaataatttgttaatatgaagacgaagaagtcataccaatctccaagaagacactcggtatccatcgtccacgagaccgtctgaatgtggagcaaccgcccgataaaacatgcgagtaacgaaagtaaactaaaagaacagcccaggagaatcaatagccattttgtccgacttcgaggataaatgagatgttgtggtcggaaatcgttggatttttgtttccccatatttgcagactcccgtatgtaattgggactggttgaggttatttgaacccgtggaaccccgtggggcgatgttgcggctccacatgttttggcatataccacgtgaccaagcacctgactgctgcttcaggtatcaactcgggcttctagtcgtgatttaagatgcatatttgtactctcttgatatgtatgttagatataacagtccacataaatacagattcgggctaattatatacaaaagcactctgttagctcgccttgagcgatgtaaagacgaaaccactcagaataccagcgatatatactgcaagaatcacaaagctaacaagcacatcggattcagatctaccatccctccaaaggtgtaagcaaagcaagcaccccatctttaggggaaacagtggcgctttctcgaatctccaatttagcatcaggatacttgagctccatgtggaaccgaccgacgacagcagcaatcaagcaagccagctcggacttcgcaaagccctgcccaatgcaactccgtggcccatgcaggaaagtcaaaaaggcataattactgaccgcgccgccggtattagccttaccgggacccataaagcggtctgggttgaattcattcgcatctggtccccacagctcttccatccggttcaggatttgcggagcaatgatcaataccgtatccttgggaatgtgcgtgtcggcaagagttgtgtcacggactgccttgcgtatggttaacggaacagaggggtggaagcggagaacctcgttgcacactgcgtttaggtagggcaggttatcaaccgcggctgcagagattggagttgggtcgccgagggaaggaagattggcgcggatttcatctcgcagacgtgtttggacgttggggttcttgcagagtgcgtagacggcccactgtagcgctgtggcagttgtctcgtggcctgcacctaagaaggtcatggattggtggacaaggttttcttcgtcaaaggtgccgctacttagtgcgacggagataatgtcaatgccggtttcggctttggggtcttccatctttgccttcttctgtcggatcatctgacgtgcgacgttgcggatgatctcgccactctgcttgatatccttgttgcgtttcgtcggtaatgagtgggcccacgatggattaccgaatagcacacatgttacaaaaatgattttcataatgagcggtggcgaggacatgattttgcggtaggattggttgagggtgttctcaggatcacgaagagagtcgaaatcatggtccataccggcgacgccgatgatgtccagggttgctctactggcccagttactgatttggacagttttgtcgttattgccatcggcctttctgctccgaaggtcatcctcaatcatcttcaccatttctacactcttggcccagaagactgggtagaggttcttgatgtggcgataggcaaaggctggcataagattcttgcgttgcgtctagtacattgtaagtttgagtccatggaagtgggatttcgggggccagatttaccttgtgctcttcaccttcagcaagtagaattccatcacctgtgatacgccgcaagctctgccgaaccaactctggtttttcaaagtcgtaaactttcgtgacaagaagctcgcccaatgattttgggcttgtcaaaatcactctttcgacatttccgacaatatagtaccgcaagagatcttgattgggtctgcttttggcccactcccgtagctgcggaaatggggtctcaagcaagaaacttggagaattgccggtgagccaacttcgaccctagatagcattagacaaattgacaataccatatgaaaaagggctggcctaccgcaggtgagtaaatgtgtttcaatggagtgaagtagtcaggatataagacaagccgataaacaatcctgaacatagtaataagcccgaaaatgacagcgaccgtcacaaccctggaattgaagatagcatactccggtttgaagtagatcccggcggcgaggccaagatagagaatggggaggctatcgctgacgcgctccattgctagatttttcggaggacccgggataaacaaatattgtaacttgacggctcaaatcacatatatagagagtaatagatgatatcttactggatatccaacactgcctcggttttgattaggtgtccagcagccagtgaagagccccgtgtggggtgtagacgagatgacaaaatgcttggctctcgttggttccggtcagatctgaatcctacacggagtacagtcttatagatagcaacgaacgcgcgtagatgacctctgcacagctgaaatgagtttgattcgagaaattccaggagagatgacagagtatggctttgagatggttgcctggagtgggacatacgagaaacacgggaacagatagaacctaaacgaaaacgacagcaattactacttgggtatgttatagctcaaaaatagaaagagaaaccgatgatataccgactatacaaatatcatatgtaccggataatgcctggaacttgaaccctttccctttccgatttagtgcttacctcttaccgctttttgatcactgaggaaaacggagcacatctctgagtaacgtaattcccagccgagctgcgcaccctaaccaacccattgaattttgacggaaaaacggtggtaaggcgagtgtatttgtggcagaaaaatctcaataaattctctaactctctaaaactgacaatagtcctaaaacatgacaatctgatggacaacttagtaatcaaaacaaacaaaacaaaatgaaaggatatttttcgggcgaaaaaccttctgagttggtttttctgcagaaaaaccagtctggtcagtcacgtgacccaactgtatcagggataaaaaatgatagtatttatcctagattctgacataccccccagcttttaaagtgattataaatcagggctttaagagctgttataaataacaaaattttccttaatatctgcttttataactgattagataactaatcttagatattctaagtaattccctaaactgttcttgtttctagtagggtaaagcttttgttaggctattagtaggcatttctacagttagaatctaatctatattaacctatctagcgttaacttcctgttttaactagtatattaatatctatatagcggagctttatatatattaacactctttcctttattaatagattaatagtctagagtcaggggagacctaagtctgccattgctaaaaagactcgctgaggctgggtgaaaaatcggccctatttcttctagaaagttcactgctttcgtcacactacattttgaactataaggaatggcggaagttctatatcatctatccagaaaggaacaagagcgattggattaggaataaaagtaagagaagtaaacgccgtatccaccgttcaaagaggaaaaagggactgtttagccatagcaatttgcgcctccatgcgtaaatcatcaagtgagaatgaaaaaatatcaagtggtggacgtcccggtaaaagagcgtttccgaacaacattttccgtgtgactttaatgggtggttgaggagaggaaggtaccgggaaaatggcttcatcctgttctttgagtggattaccgttgttgtccagtcgccaaagttcaatcgtaccagcaacaccggctcgtctcttgaaccacttaatcaatatcacagcagtaatttcaccctggcctccgatcagtaatcttcgcatgtcactttcaagaaggggttttgattcgctatatccgatttcgaagcagagcgtgggaagattgagaccatggacgttcacatgtacatcaggttctttccgacaattagcgtagacgccccgtgtgagtgtgatcgtatccgcgacttgggctttcatcattctcttctcggctgtcgtcagaagcccggcttctatccacttgtctcgtgcgtcttggaaccagattagggcacaattatgtagcggtgtaggtattttgatcataaaggttccagtattaggatcaaaggactttcggagtgcccgtgattcgagttgttcaaatttctgccatagttgtgtaccgacatgtggctttagctgggtaatgacgagtagatcaggggtattgattcgttcgcgttggatgaggctttggatggttgaatagacacgcacagcagttgggatgttcgctgcagagacttggatggggcgtaaagacttgttaatttcatcgtgatcagcttcagggagatgggaagtgggggaaccaggttgttgaggcgatgaagttggacacgaaaagcacgacatggtgaagacaggtgggaaggaggcaacgaaaatcgtgaaacgtcgaggttgtagcttcgggaaggatcgttgagaagttgtaggtaactagaaggaaggagcgttggcaacattgacgtcatgcttatgtaaggtaccctaaggcgggagcttacagaactaaaacaagagactacgatgaggcaaaaagaagcgaaagaacactgaaagtaaacgctcttgatgctgctgaaactgaagaggagaaaacaagaatccaagaaaactggatttttgacgacttttgcgaggaagaatatacgtaaaaaaaggctttgccgctgttcatgtcgacagtggacagaaatgaggtcacaagaatatcaggggtcattgtggtaacgaacacatgcacgtgcgatgcaagagcttcttggattacatcagtacaccaatggcattccttatatctagtagcacaatgccttcccgtcatgacgaagcatcggtagatttaagcgaaataggaagatagccgtctagccaatctcagagatcattatggttacgaccacagtcaacacgtataaaataacagaattcccgagctacatcagcaaaccgatggcatttccttttggtctttcgctaaagatagtcgttggttcttcagtgtcgtgctccagtatacctgtatagagccttgagtcctcccgggaaacttttgaacaaaacgcttggtcacttctgaccaggctagtttctgttcttccctgagcttcaccagtagacgatcctcttccacagaccatgaaaggccttttctcgagggacgcgtatactcagaagtatccgttttgccgctcgtgcttgagttattaaatgtaggcgctacgtctttttcatgtttcgaaatgtagcttgacacagacgtgtcctttccgctcggcacgggagcgcaatgcgacaagacaatcttaaacagtcaggacaggaactgtagtctgtcatcggctgagagggcagagaattgagcacgaacagtggaaaatgaaacgtttttacggccgagcccttaagcgaatcgactagtctgatgcttggtatgaatttccacgacgactgcaactttgttgattctagaaggctgcctgccaggtttcaccgtcctcttcgagctctgttgtctatcattagaacaggcttccttatccaataatcgagatttactagctgatggcctatctggacggactctaacgcgaggcgcaggctctaccgcttaggtctcctttaatacccgggaagtgatactcatctaggattgccgggtcgattgatatatcgtctgaaagatctccaggctggataggactattaggagacccaacttgatagtactgaccagcagagaaagcgaggtccagctcgcctgattcaaagctggggagttggtacttagaatcatgataaatattatggaaaatcggtatgcgattaacgttcccagagcttagtagatcttgtatatatagaatttcttcgaagtcgaacgtctcaatgtctggattggtggatgacggggttttgtcataaaagcggcggcagctcaaataggaaagcccacccgccagagaaaatccggtacgtatagagacacatatataacccgggaacccatgtcgagctgtatatgacattcacatggtctggcattgattacgtcatcagatcggctggcacccaatgtccgtcaacatcattcacactcttaaggactgttaggactagctactagcatatcctgaaatggaggtttcgaactagagtgggggttcccaagatggctcatgcaattcagtagactaatcgctaaggttctaatcctctgtgcgcggcgtgtgtgtacccctggcgcttacttagcgagtacgtcgagccatacgggccagttgtgcaggtgaccctcggggtcgtaacaaggacataatggactcttcgccagatagcgaccctgtcgagacagagataattgaatctttcacacccgattttgatattgtggatccatggttttgactcagtcaacctcaccagaagactagccttcctccatacgcacgatcaataaaaatcattgtcgcgacacagcgtcttagtgataaatattaccagagttggcatctactcaaggacatggggtcaccggaagaaagtgccaggttaaagacatggaaagctttgaggattggaccttgatcctatcgaaaatattggacaatgtcgatgtgatgtcaatacacagatgcccgtcacatattcgaagttataagtcgcataccctgccaacctaacaaaggcgatattattataggacgaagaatgggaatatattattaaatcgaaactcaaaacatcaccaaaaagcaaattctcactcagacgtccttcgaccctatgattctatcaaattcaccaaccgtatgctgccaaaccttctgcgccatcccctccgcgcgaagtccagccaacaacttcacaaccttaggaccagcgtgctctccattccagtgaatagtgtaaacaccactcccaaccttcccatccgtcccactggcaacctcaacctcctccgacaagggcacaccagcggaattccccgcggcatccaagcagacacggggaggatatttagcactcgtcgcaaagaaaagatgtctctccccggactcccgaatcgggatgtaaaccaaaggcccgataaccatgagcacgacattcataagccaggtcagaaaagtattggactcgcgcccaatgcccgtcttgactgcgccagggtaatcgataataaatgacacttctggcgcttgctcggccagtgtttccaaaaccatatcagtcatggacaccacatgtccacgtagcttcagcattgacatcgtccttccttggaagtcagtcacgtcgatgggaccttcatggccgccggcgagaacgctgaccacgcgccgtaggcccgttgcttgtttgagattggggaggaggttgatgatgaatcgtgttcgagcgtagtatgcagctgcacccaagatgtggaggccttcggatgtatctgtttgcatattatgagcaataatgtctttttttatttttattttcttgtaagggatgtggggatgtcctgcctaccttctccggaacgaatagttccacagctgaggaagaggatgttgatactcttttctttgttttgaagctcgcgacagaccttgtcgacgttccgaatcaaactgacgtccgctttgatgaaggtaaattctccctccgggttcagctgtcggcattcggctgtgatgcgggctgcggcttcttgcgaccggccgatgaagtatgcgcggggcgatcgtgctgagcgggcgaactcttttaaggctgcttcgccgatgccgcttgttgcgcctacgaagactgccacgaggcctgctgggagtgtgtcggcgatgtgggcatttgaggactggacgtctggtagagagaccattttggatgctgtgaactgacacaggaaattctagcttctatcgattatggaggttaaacgagggtatgatccatgtatttatactccgtatgtagagatatttctcgtattgcgctgtgttctatattcggtacatctataggccgtctcggtcggaggacggacttagccacacgaggcggaggaatgaaatcccccgggaatttatccttatgagaataaagtttcgtttacttgtcgtattcaattaaaacgtgaagatataattaagagatttattatcagaatatacaggaatagttggtcgcttatttggcctagacatgtatttttttaggtacatcactcgcaacatattgcggaataggagcgactgaaaatcatttcaaaaaaaactcatagattattttggatcttaccatattcagataaagcccacttcaccatccattctgactcgagaatttacttggtggtaggacgatcctcgggtctgaataagagcatctgtcgtaacatgtcgaagagagcgtctctttcccttgcatcaaacgataggatccccttctctcgcctaggcttttcaacgctatcctcaaaccgatcgtcgcaagatcggaaatatatacggtttattggcttaccatcctcggtaaatttatgctgtcgcgcctcccaccttctccaccattcaggcggcaaaacaccaagagtatccacatgttcacaggtcatgtcgtcctctgtcgcgagaaattcttcaaataatggccgttgagcgatgatagaccatatggtacaggcaagagtccaaatgtccgatgaaaaagaaagaggcttatttggttcaaaacgagcctcggggggccggatacctcggagggtgcgagattcgtatttcagttcttttgagggcgaaaaggcttcaccaaagtctgtaagtaggactcgagcttctgcaagcgtggtttcctcacttgcttcacctagccatatgggcataatgccatgggatgggacaccaggaggcagcgatttgctatctagatggacaaccgggtccagctgcggtactccgtatttctcatataattgttcgagtgagagttggtcgaaactgggcgcaacttttagaagaatgttgccgaggtgaaggtctccatggacgattccttggccatgcacataatctataacgagaacgagttgtgcagccaatgaccgggctacatcaggctggaacacgcggatccacgaaccatctttcagcccggagaggctggccctcgccgtcgctgtaacgtagcaaacgtgattgccatttgggccgcgaatggtaaaactatctagaatcgaagggaccatcgcctttcctggattgttgactagagaacaatgaggacgagtgagagtgcataagatatccacctcctttgggttcgagtctgctatgaaaacttttaccgcaacgtatttattggattgttcatcacggccgagccacgtagtcgaataagacccatatcctagcttatgaaccactcgatatcgactgtgaaagtgttctccgattttcattgggtggtagccccctggtcgataattctctattctttcgactccctcgagaggctcgtagaggaaataggcggtggaatcatcatcagtctctattgacttgaatgcggtgagagtgaacgcgcagcgtggttgattttgacgcagcagtggcatgagcacctgccggcggataggagaatctcggtaacgtaaaccattcgggcgtaacaatagaatggacaatgacaacagtttactcatggtatatgtgtacaggttgagctgaaagaactttaaagaaggagatagaatgctgattaaatgtaacggaacagcattgatggttgggagaaagggggagcttgggctggggtgaccgcccgcgggtttttctcgatcttcggtatcagacatgccagtgtcaagtatattcgatggaatgcgaaagcagaagcaactggaatagattaggcagactgaattgattcaatgccttggcactgttgtataggaagtgcttgtccagtcttggcgttaacaagctcacagggtcaggtgatgttgcctaaaatacagtgagaatgagattcgagacagccctcgagtatatcagaagatccttctcaacggaagcgccctgagaagttaggattgcatcatccaactgtgtagcgcccggagacagagcttatgcacatggaccctcccctggcgcgtgctgatggccagtgagcagtcagaatagagtgctgaaggatccatcttcccgtctgtctcagggtgttgaagtgggccagtggcagaatgttgttgtccctccaagaatagacatatgcaaattaaaaccttgatggatgcatgcaaagatgttcccaatttagaacatccaaaacagaccgaacaaagagatgaatggacgaagagaaagctccctcagccttaaaaacacccgctcgtgcctgtcccgcgtccccacccctgccgaactcctcttctcccctcaatgtgtttcacttcttcttcccctttttcaatttccattccaacgtcactcatttcccagccaacttccttggaaagttactacactcattcaaccctatttctatcggtaatcgcgcattctttctccatataattgtggcccttttcttggtatatcggcggtcaatgaaagcctgtctattgtcgctttcaataccccaatgcgcgtttgaaacaccagcgcttcattgtgatcatatacacgtggcttgcagccctcgatacctgatatcgtgatcaacctctctccttgcattccgcaggtatgcgccactcgcgcggttaatatactatcattcccctcgttgcgcctgaattttggctctctctactctttacacctgcttcaaactcaattacgactttgcccggctggcccgaggaagtcgacctttgatcgtccgtgatccgccattctctacaatcctcagtgatcacttcgtgatcactccctggcaggaccaggtcaattcacacaatgctgtgcggtggagaccgtgagaagggggatgtggcgatggaggagaaatgggactatgtggtatgtccgccccaatgacagtgttgtatagataactcggcatactgataatgactcccttagaacttggatgacttcaaatctgagtcttgctggacccccttctcctattttttcatatggttgttcctatttatctcgattgcagtctacggtgttgatacattcactgcagtcaacttgctggctttctctcgatggtccggcagagttcaacccgccattcccttcaatatctcccggtggatcttcgccgcctgcatcattgcttctttcattcttttggcctacagatggatacatgcaatccgctccatccgctcgggtagtattactcgcagctttctggacccgttggctgtgcgtatccaaagtattcgcctgggcaagcgcggtcgtggatacaggagattccttgtcttcgctgaattaacgaaagacaggaaagcagcagaatatgttgctctgtatgcgtacttctctttccagtgtaagcatactaccattgactaactgatcctcgaatataactaacggggcttttagtctggatgaacacgatcttcgcagatggcccgcgtcaagttctcaatgccatcactctctattcggtcatgcaaatggacctcattcccgggggcaagaatgcagcccacgacgatggaacttcctcagttggtcaattcttcaacaacgtcaagattttggccgaggacaacaaccttcaagccgtggtcttgtttggtatgcttttcaccctggtcgtttgggtcctatcggttctgaagttgatatcggccatcgtactttatttaatcttcctcttccaccatatcccagcggaagatggttctctttcgaagtactgccgtcggaaggtcggtcaacgtctgaagcgtatcgtgcaccgcaagaacacaaaggccctggcgaagggactcaaattacagaatcgagcacccactcagccaatgctggccatggattcgaacccgaccctgccgtctttggccgaagataagcaccccacagtggcttcttcgttgtcgcgaagtaccactcagaccaccttgccgccttactcgcgatcggcttcgatagcgccgacggccaacccgacactgccgaatctggaattagatgccaaaccgacactaactcgaactggaacttcatcttcagcaatgtccgagtccgcttcactgacaagcaatgcggccggaatgggatacagtcctcttgatggccggaggccgacgcttcccccagtacctcccttgccctcaaacgttccatcacggatggccactcctcactcccgaggaactcctgcgccatatgagaatgatggtcgtaatagccccggtcctggatatcgcaacttgactgatagctctgattctcggtcatatcagagtcacactccagcgcctgattatgcttcggctgaaatggacccttccgattaccacgattatttcaaccgtgacgatgcgccggctcactacgatccctacgggcctccaaggggtacatccagggaagccgacggttatggaggaagatacgggactcctagtgaccagagaggcgcgcctcgcgcacagcaggattactacccacaggatccatattcgaacaggtcctacacaccggctagcactggtgggacgcctgctccctatcggtcctacacaccggcaagcactggtgggacgcctgctccctatcggtcctacacaccggccagcactggcgggacccctgctccctatcggtccaacaccccggcaagccatcgacccacacctcccccacaagccgcattggcacagcctccaccaaggacgttcactccggtgagttcggcaactcccgctcctcaaaatggtggctatgcagctttcaacccgtcaatggttcaccaaacatctcagcctcgctctaatgggcctcccggtccgggcagctttactcgagcaaacaccgcttcgccctcggccatgcatcgtgctcccccagggcacacattcactcgctcaaatacccatcaatattgatgaggttcaccctgtaggcctcatttgaacgccatgagactttcctatgatgaaaaccaggagctggctctcctgtggttgatgaccggatcactcgctaatactgatcacgaccagcgagcctctctagattctgtacatacccctattctcctgactgtgatatccttaaattcttattccccatgacatgaattgatctctttttgtttccgaattcactacagagaatgtatagataacatgtagcttcgaagtaccattggaatcttgatatttccttctattgcgcgattccatgactcaatatcaatcagaaacaggatgatttattatacacctatacataaattacctatacaatcaacacctccccacgatccacaacaaacagcacccaatcaccaaatcttcttagcgatcatctcataccgctgtacatgatcaacactaaactccccatccttactcttatccttttcctccttctccttcaaccgccgcaatccatccggatcatccgcatagatcaacttccgcttctcatccccaacctccacaacaccccacccaccaacgcgctgactaccctcaacatggaaatcgcgcgaacgaggtgccccactctcagtaccagactggttattcgaggactgtttgcgctcgctctcccgacccttcatcttcctataacgggagcgcgcaaaggcgagcaggaccatgcccagcagcaatttcaggatgagcaggacgataaacccagtcaataacaagatgccagtgaagatatggacggactgggctggggacgggatggcgttttcgaggagggtacggaagaacgcgctgacgtgggcggcggaggcggggatgagggttgctaaggtcaagggcggggccgacgggatcggagagggaacgtagtggttgtggattgatgctagggaggttgctcccattgctgttgaggaggggttttgggggagtagggcggctaggaacatttggtaggtttgcacggagacccggaagaagaggcaggagagagggatgactgggaggccgatgcggcgggttaggttctgttcgccgaaggcgttggtgtaatagtccttggctagcacgtcgaggaagcggccgtagatggctgggcggttgttgttgaatttgttgatataggcgtgcttgagccagtctactagcatctcggagcctagtacaactagaaatggacctaggacttgggctaaggtcgggatgaaagaattgacgctgtggaaggatgatagaattgaggatgggaagagggtaaatgcttggggcaggatggatgatgcagtgcgtggaggggtggatagtggtgtgctgttcgtgattgtggaggactggcccgggaagctagatcctagcccgaggttgccgatgaaattgaatgcacctgtctccacgatattacgcgaagctatgatagtaagcatcagccatagctggaaccgttccacaacgtccgcacaggtaagttggaagaggttctctttctcaaacttgcggaagacggtagatttaatctccacaaattggtttgatagaagtagcgtaatcaatgcgttggagtatgaattcactgccacattcaaggtcatgacctggtagaacagagacaatgcatgagatactgtgtaaaccagtgccactaggaacagccagaatggacgaatgatcttgcttcggccgtccggacgacgctcaagagcctccctcgagaagagacactcgaggacatcttgacctatggcagctaatagcctgtcactgacctccagcacattgtagataacatatagcttgatagcagcctgtccgcgaatccagtgatacattcgactcgcatcgaagtacatcaaaacacagcaggtagctatcatcagcaggcctgtcagaatgtccgctttgtcgtctggaaggagcgccgagggcatcgacttcttccgtcgatggtgatacttgcgggattcggaggttcggtgtttccttcttggtgtttccgactgtgactgtctggagtctctatctgctggtactgtgtctggtcctgcagacgagcccgaaggaagatgaggggtggcgtcagattcgctttcgggtcttccacgctgatggtcttccttcgcattatgatttctcctgcgccatactcgaccaatcccattcagcacaaatttccaaatgaaccgaatctcagctcccaagttcatcacccatgattcgcccaatatatagacagctttgataaaccgcagtggcattatcgtgaaagagtaaagccatgcatcgaggcaagcaagactcccgaagcaaagcacctgctcaagcataggtgcaagcataatgaaattcataagcctctcaatcttcactcgtgatgattcatatgggaagtcattggccgcatcacggtggatgtacagcggtgaaggtcgaccagaagcaagctcaagctgaagataggttggcagagaaactggcggcaaaggaatagatgatggcgagggtgagggcttgggcgattctacaatctgaggtgatgcaacaaggtgactcttcaaatcgcgttctaacgcgggtcggtcctgtttcgggcgcaacgcccatgtctgggttaggcggtcattacttggggtaaggggcagttgacgccgcgtagagccaggggtggacaatgttcgtgctggctgcggccgattgcggagggatgaattttgaatattccgcgggaaggcaggactcgccggtgtagaagtatctcctggcaacacttctttagtgggccgcaactttgttaaaacatcagcgggtgaaggcctttcgcttagtgactgaagcgcaacctctggtatctccggtcgtgcgagaggagcatttccatggacgttgtccgagacaactcgccttccagggtttctttctagtcccatggggcggtaaggtattgactctggcgaggacgtgagctcctggatcttctcaggagataatttcatgaccttgtctttatcctctgatagtcggtgagacagatcattagacaattcagccaatgactcggctaatgtcgccttgaccttggggccatcgtacacatcaactaccgacaactggccaatattatccctggtgttcggtgaatgttcgaccaggatgccgagtccatgcgcggattctaaatcggctattttatatgctccgtttgtaaggtcccgttccgaggttgtatcgtgtgtctgttgctcatttgagccatcgtctccattgattgggcgttcgtcggcctcgccgttggactgcaccacagtatctactcgactgcatttctcctcaacagtatagggcaccaattgctgttgagacttcgagttcccactggctccgttttgaacagtattttcagccatcttccgcttgtgacgaaacctcactggtatctgcaacaggactaattttgacgacccagcaacccgcgagaagccaacgtgttccttaaaatacccacaagcttgcagtatcacctcttataccatcagaaagtgcaggggtctccgactcgcatcgtctaaattggctcgtgacgagtgatcaagctatgttcgaaggcgaagaggcgtaaaaagagatagaatcgcaaaaatggcgtagtttgttgcattaacaattttgttcaaccagctggcacatcctgaaattaaaaaaaaaaaaaacgacgcactgtctgagctgtttgcttgttgatgtcggcgttgtctgggggaagataaggatggcaggttatctggcaggtcggtgagtcggaggttagcgccatcggtgctcggacataaaaaagtaaagtaaagtcacgtgcgcctggaatagggagttttttacccctggaagggactacaacacaactcaaaaatgtctctattctcactgccaacggagcttttgctccttctaacgcataatctgcaatatgcatccgagctcagcgcgatgtcgcaaacctgtcgccggtttcataccatattcgatcctgagctttactcacgatttgcgaatagctgtgaattcaacattctgcgccttgtggaaactggcaattcagacgctatacaaaagctaggtctgctggttacaaattgtttgattttctagaaacaccggtggattggtggcagccatgtgacacgttcgaccttgaccgtaacttggaatctaagtcttccatgaccatcgcagcacggaatggtcatctgaagattcttcagctttttgttgaaaatctgccttcaatcattacaaattctgctcgatcttggtatcttctgatgcacgcggccctacgtggtcagttacatgtagtcaagttcctaattggtcagggtgtcccagtgatccatgttgacaagtcagcgcgtactagctcgattgttgatgctgcagttttaaagggccatttgccggtggttaaatatataatcgaggagattaaattcgcggatcgatcacacaattcggcagatcctcttctttgccttgccacacacgctggtcatttggatatggtcaaatatctggtcaaatgcggtgcttcctttacttgccaacacttctacccttttcgtggctcggccttcgacattgccatggacgagggctgggcagacatagcatcattcttcctaggcaatgcaactctagaagatctagatatcataactacaagcggctggaaatggatgtcgaaaccttgtagccaggataaattcggacatatattctacccatctccatggaaaaagccatccattgcccatatgatattggaccgagtcgatctggagaaacaactgacaacaattactccagataacgaacaagaagtgcgaggacgacagtttcattatcccaatggacgtccacggttggaccacatacatccacgctcatcaattcaattgctcgtcgagcatggcgcagaaatcaatcaagtggacgcaaatggccgaaccgctctgtttttaactatagaaagaaacaacctcgtcttgacaaaggaacttctcagactgggagccaaccccctgctcaaaacgtcggcaaatgtcagcgctctcgagctggccatttcaaagtgccaaacaaagcacgtgaaggcatttttgaaggctattgagattcattctttcacatgtgacaactttagtagcctcaatcctgacgttctgccaccggagaagctgccgaacagagctcctacatgtgcaagcgctcaatttcatatttttgcgaccgattttctttcggtagaaggaatcattgcaagaaatggatggatggatcaacctcggggatcacgagttccagtatggtgtcggaaatcgccgcagaactgggaggagattttggaggagagctctgaggaaagttcagaggaggactcggatgaaagctcgggtgaaggctcggatgaagaatgggataattattcggtgagtttgcagaaggagggtaccgaggaagataactttgtaccaatttggtctgcaaccaaggatgatgacagtattagcgatcctcgctgggcgcgattcttcatcgcaaaggccatgacctaacattactggcgaatgatgtacctagtactagtttagattggaactgaaaggccacggaagacatttataaataagagatctgatttgttaactagatacgaatgagtatgctcaggtgctagactaccacctaagaagccgtcctttctgttccatttgactgtgcaaaccaggactagggccttcacaaattgcgacacaaaaggattggccagttctaaaacaagtggaagcatctaatcgtgaaggcctatcattccagattcgcatctcaatcatgtctttcatgtggtattccataactcaatgcatatatgctaactatcatcggatgtacgtcaagtgacagggcaaaacaatgtatggctcaatcccaaagcctctagatctaccagtagccagggaaaagccagtccagcttctccttagcctcgggagtccagttagtctgaggggtgctaacaccgaacttaataccaccagccaggtgcttagcctggactagctcggcgtgctcgtcgctggccagggcatcaaggacagcagtcacgaagcgacgagcgttttcggcgttagacttcatgttgcccattaccatctcgacagtcacgtcagcggtagcctcgtgccagcagtcataatccgtggacatgcaaatcatctggtaggcaatctcggcctcgcgggccagcttggcctcaggtagagcggacatgttgatgacactgccaccccatgagcggtacatcttgctctcggcacgggtggagaactggggtccctctgtacgatggaaaagacatggttagtaatgttttgtcgtaaggataagtcacagcttcacatacccatacaaatcagagtaccgcgatcgtgcaggacgacaccgtcaccctcaaggctgtgtccgcactcgcgcaccaccttggcaacaccctcatcaaatgggtcaccgaaggggacgtgggcaacaatgcccccctcgaagaaagtccacgggcgcacgcccttggtgcgatcaatgacctggtcggggatgacaaagtcgcggggcttgatttcctcctgcagactgccaacggcggagaaagcgatcacgctgcggacaccgatggagcgcagggctgcgatattagcgcgagcgggaacctcatgaggagcaatctgatggtgcaagccgtggcggctcaagaaggcgacagcgacaaccttgttgttgtgcttacactcgtggtgcagaatagtgatcggcgaggaagggacgccccagggggttgtgacgttcagcgaggccacttgagtgaagccaggcaattcgcgcagaccggtgccgccaatgacagcgatggggacgggccctgtcagattcaatatcgtcagctttctatcgtagtgggggtatgaggggtagaagtgagggaggcagaagcacacgtaccgtcatatgtagtagggagagaagccattcttcgagcgagttgtttcgcggactcaattcgacggaatggtttcgatatagaagagaatgaacgtgagcctaagatccagcgcatcttgcgccatcttcaaatttctgaggctgcggccaacctgcgtttctccgattggttgtttgctgacccacgtgctgtgggttcctgaggccgccacctaccttttcgggacatctataaaactttaatatacatttacatcgacagtccctacgcaagtctccgtacacggagatatatatttgatggcgtatgggttgtatgaaaacttttgcggtaaaattgtacactctacatgtctatcagggtcacagttgaccattgatcgagaacatcttcaaaattatattctatgcagtcaaatacatgttcaatttgggataataaatacaacctagatgacaagagtctggggtaatgcacttgaattaatttaagccggcagccactcgtagtggtgagggcccttgtgaaccggtccaggatcctcaccgggaataccaggcttgttgtagctgtgtgcaccgaagtagtccatctgcgcctccatgaactgggtcggcagtcccaatccaccctcatacttgagatattccagagtagctgagagagccggaatatattgatcaaacatggttccctccatgacaacttgcttgagactatggaagttctggtgcaactcatgtgcaacagtatccacaaacttggcgtttgtcagctcattttgggctgcaagcggcggctgcagtagatccgcaatgtaatcagacttgatgatacatcccgctcgccagatctgcagacagtcgcccaaattgaccttccagccttcgtctatcgaggcccgggaaatcagctccagcccctgacagaaagatgccaggaacgagcagtacacagcttgtcgtaggttctcgataatcacattgtggtcccgggttccctctatcggtttcggcatgggcatctccagcttcttcgcaacacgcgctcgctccacgcgatttccacttgagattcgcaggtactgggcagccgctaacgtcggacaagagacatgccgggcggcagactccataacacaccagtgtggagtaccttcagtaccatcgtcgtcctgaaccaccttgtcgaggacatcatcgagcacatatccatcatcccgactggctccctcgcctttgtagtctcctttgggggttctccgtgtgtgtaaaatcttggcgccgatgttaatcaggaagttgccccgcagctcgccagtctcattccatttatcgaagacatctccgattgtgccatgctccatgccgagtccctcgtgcatgtattgccatgtttcagcaagtacagaaagcattccaccctcgatgccattatgaaccatcttgatgtagtgtcctgatccaccgggacccatgcgcttcacgcaggcagtcccagttttgggatcatgggccgcatacgactccaagaacggcataacacgctcgatggctttggcatctccacctggcgagagactgggtcctcgtcgtgcagattgatatccacccgagacgcccattccaatccaggcgacaccgatgtcagcacactctttctggcgccgctcggtattccggtagttctcatttccaccgtccaggatgatatcaccctctttcaggtctggtttcaacaagcgaagtacttcatccgcggggtcaccgtgcgtgatagaaaacatgaatagtttgtggtcggacttgccctctaggctcttggagaattggttgatgtcatagaagccttgaactcggcctgttatagctttgtcctctttggcgtagcgcaccacttcgtcgacgttcttctttattacatcccagacagagacttggagcccgagctcagcgaagcgaagggtcatcatagagcccatgtttccagctccgacgacgccgatgcttttgatggtggacattgtgaattggtcttgattctgtcaggctagctaagtgatgcaaagttcaagtgggaagtatgcgggaaatatttacaagaaaatgtctgggacgatcatcgctcttaaacaagaagattgtggcggtcggatctgtgatccgagcatagtcaatatggaatcagacacgccacgaacaagatttgtgtagaagaggcaagtgaggcgaaattaattgttgtagtgtctatcaaagactcacattatggccaagctcgatctgggctggtatgatacaccgatgacgacataagctctaaacaagaacagcccagttcaacattacatcacgatggacacagaatgaaaaaggaataggcgaaaaagaaaaggatgaggcaaatatatacccaatgataccaagcatggcaatctcccattcaagctcttccctcatacgtccagtgaactatacgtcttcgcagatatcaacaagcctcaacaaaatcacgatccactatacaatcttgtttgacagattttagagggaaaagaaacgaaaaatgtcaattccctactcaagtctccaaaaaatccccctctcatacgcttcctgctcaatcggctgcggcccgaaggacacccttccgcgccgcctcgaagcaatcagtgaagcaggcttcagcgcaatcgagctatccttcccagacatcttagacttcggcgcgctaaccactggccatcacatcgggccagaaaattacactgcaattttgcctgtggccgtggaaatccgtaaactatgtgaagaacgtgggttgaaaattatgatgctgcagccattctcaaacttcgaaggttgggtcaagggctctacggatcgtgaggatgcatttgctagagccacaggttggatggatattatggatgccgtgggtacagatttgttgcaggtatgatatggatatatatatgttgagcacgagcaataagctaatgacatatccaggtcggagcaacagacacaccagaacccttaatcacaacagaacgcgatgtcatcgtcgctgacttgcgttctttatgtgatattctcgcaaaacgcaagttccgcctcgcctacgagaactggtgctggtcgacccacgcgcccgggtggaaggaagtctgggagatagtgaaagcgatagatcgcccaaattgcgggttatgtttggacacattccagactgcgggcagtgaatggggcgatccgactacagagtctggtctgattgaatcggtcccgcagtccgagctacggaagcggttcgatgcgagtatggatgagctcgcaaggtctgtgcctagcgagaaaatctatctgcttcagatctcggatgcgtataagttgtcaccgccgttggagggaaagattgttggtggcctgagggctaggggtcggtggagtcatgattataggcctatgccatatgacggcgggtatttgcctattgaggatgttgcgagggcggtgctcaaaacgggcttccggggttggttctcggtggagatatttgatagtgggccaaagggaactgggaaggtgtatgatatggggtcctttgcagcgaaggcaatgggtagcgtgcagaagtttttgaagaattgtgcgacggattgagaaaagcaaatttcccacaaaatggtcataatgatatggggttttaagaagtctggttggtacatttggcatattgactatttagacttgaaataaatacacattttgaggactccttggaaggtcgtggacacgattgaaagaaaacgccggggtagaatgcaagattgacgccaatgagatcataaagcatgcaatataccttggaggtcatggataggataccattatccattagttggcattgctggggtacgcaacggtatatgttggaacgtactcctccttaatggaacgcaagctgacgaaacgggacattagattagcacttccggccttatcattggtaccgctagcacgtgcaccaccgaagggctgctggccgacaacggcaccggtgctcttgcagttgatatagaagttgccagcagcgttgcggagagcctcatcggcgacctggatagccgcacgatcctgggcaaagatagagccggtcagagcgtaggtgctagtactatcaatcttgtcacaaatcttggtgaagtcggcttcggtggcgtcgttgtaggagtgaatgacaaggatgggaccgaaaagctcgcgcgaaagcagagggtggtctgggttggaggtgcggtagactgtaggctggatgtaccatcccttggaagagtcgtaggttccaccaacgagcagctcaagttcggggtcattcttggcctcctcaataacaccggacagcttgttgaatgaggcctcatggatgacgggaccgcagaagttggtgaactcagatggctcgccaacgtgaatcttctgcacctcagcgacaacctgctgggcaaagtcctcagcaatcgacgaggcgatgtagacacgggatgtggcgctgcacttctggccctggaactcgaaagcaccgcgcacagtctggaccgcggcgttgcggacatctgcagacttgtgtaccaagtggaagttcttaccaccggtctcacccacaatgcgagggtagctgcggtatttaccatccgccacgccctgtgagatcttaccgtacagcatgcggaagacatcagtgctcccggtaaagtgaagagcggcgaaatcgcggctttcaaggacagtgctagtcacttctgcggcatcaccaggaacgaactggatgacgtccttgggtagaccggcctcaagtagaatctggtgtacgagccagttggaggcaattgcggagggcgagggcttccagatcacgacgttacccatcagagcgggtgcaccagccaagttaccgccgattgctgtgaagttgaagggactgatcgcgtacacgaaaccctcgagaggacggtactcaagacggttccacacaccagcggagttgtgactaggctgttgcgcgtaaagctcttcggcatacttcacaccgaatcggaagaagtcgcagagctcagcggcggaatcaatctctgcttgccatgcattcttgccctgtccgtgcatagtcaaggccataatatcgtagcggtacttggtcgcaataagatcagcggccttgaggaaaatgctagctcgctcggcgaaaggagtttcagcccaggacttgcgagcggcgagagcagaatcaatggcggactgaacatcggccttcgacgcgttggaataagttgccacaggagcatgggttgcggggttagactgagtgaaggtttcatatcccttgagctgtgtgattgaatgttagagatcgatagttcggtagatttaatatgtcttgcgagttcttacctccttgcccgcaactaccagaggcacgttcaaaggggctttctgcttatagtttgccaaagcctcctcgagacccttgcgatctggagtaccaggaatatagtgtttcttaaggttcagaattagcgcaaatgatcaaacaatctcaattccagttccgagctcacattaggttcgttgttaatttggggcaccttgaaagtggcgtacgtgcccatggagcgtgtgctagagctcggaacgcggcatgcgaggcgcgaaatgggcgcgcgggtgcgcaaaatggaggacatcgtgatagtttgaaatgagacaatgagttaacttctttccaagcactattgaaaagggaagatttggagaagaagtagacgcggggaagaactatgatgaaaagggccggctactaccggtcagaagctcatagctaccacggtgggcctccggaggtgtccaggtgggactggctaaagaccatagccaatcatcggtggccggctgctgtcccgggtggatactaccgggccggcgtctatcagcgcggtccaccggttttgtgaaatcaatttgttgaccggccctgtcccccacatttcaagttcttattagtcaagagataataaccttgggaagattgagtcctcgggattccccgcaaacctagataagcttgatagcggcaagataaatatcggataatcaaattcatgggtacagtatacaaagttcacaggaaggtaacgtccgatcattcccttgactgatatactttaaaatctatatctctaccacatggtattatgcacggtaaaagcatcatctttattgtaattgtagatagaagcatcctaaaaataacagcagactaagcaaattctatgcaatccaccaccacactcgctctagccagttgcgtggctgcggctctacctcctcctcttcaagtcggtcgatctcatccttgccagtgaaaatgtcaagttctgataccttggtcatccatggcgtcttgtagtatattttgtggccaaagtacagcacgaagaaaatcgcgaagacaatgtaggaaacaaggaagtccgacgcagtgaaagagcctgggaagaataccgtatagccgttggtaatagccaggagtgaaataaagccaataacatagtaagcgccgtatggctggatgggggtaatgaagggcctggacgggagcagcccgtggaagtccaatgcgctgcgccaacgctaaaataatttgttagcaagttattccatgaaaaagacaggaaaaaaggctatttaacttaccaagtacgccactgccacgatgacccaagagatgaaacctccaattgtcgtgatgttggtaaaccaataaaagacggttgaacccgaagtagataggttcaagaaagacagcagaccgatcatccaagtgactatcacagcattgtacgggacaccattcttgttgcagcgaaggaagattttgggagcctggccctcacccgcgagcgagtaaagtgtgcgagacccagcaaagacccaagaattacccgaggaaaaggcagagataagaacaacagcattgataacgtggttcaatccagtgataccagcattctggatgccaataacgaatggactggcgccagcaccagaactgccgctcgcaacaccctgcaggaggttcttgtcattgtatgcgactatcacaccaatgaccaatgcgcccaagatataaaatgcaaataaacggtagataaaccgctttgccgccttggggatgttgcggcgtggcgaggcagcctcgccggcagcagtggtgatcagttccggggagaaaatgaaagagaatccgcacttgatcatagcggtccagaatgctagaaagcggcctgtgttgatgtttgggactaagtaaggttccacaaatgcgcctggtcgttgccagtaccggaaaccgagacgatcatggtttggaccaccgccgaagaaaagtacaatacccaggatgatcagaccgacgatcgcgatgatcttgagtgatgcgaaccagaattcggcttcgccataccaggccaccgcgacaatgtttagaagtagaatgactagagttcatgcgttagaggatatcaggtataccgcactgttgggcatgtacccaccaacgagaatgatcgcaatccatacaccaacgctgactggggactgccaatattcaatgaccatccctgacgcagtgacctctgatgctatcaacattgaaaatgaatacctacacagggcatttattagtatgacaaactcggaccttgaccgaagggttattaccagtagttgtatcctagtagtatttgaatcagcattgggcttgttaaaaattttcaaagtgtcttcacataccaacagcaaatccaagactaggttccgtaaaccgagtaatcaaatatggcacagaaacaccttgaacgggaagataggtggtcatttctccaagcatgttcatgataaagtatacaatacttgacatgacaatataacccatgagcaacggagctatcacatattagccccatatcaagtttatgtttcacacgctgattcttaccaggaccaactgtcgccagcgctgagccactgccaacaaaaagacccgtgcctatacaaccacctagagccaagaattgaatatggcgcgagctcaagcctcgcttagtatctgagttgtgaatgatctccccctgcatgtcttttgggtcgtcatatggggactcaggacggaccgccgcctcgagactcttaggtgagtctttcatgatgtgcgaaggcggagaaatagaaagattggccaatatacaacactctcgggtgagagaagaagaacagtaacacgacagaaaattctagagagtgcaaaagcctataaaacaacttatatatccgaggacaggcacaaatcttattatatagccccggagaacaaagctaggatagaaaaccttgtctaaaagaaaaaaaaaacaataaaacacccaggggtgaaaataagtttccaccgccaatcggtgattcaaagtccaactagttgtcaacaacgtgagatcgtatgtccaatgtccaaaagagacataaacatccgcgccctcgtggagtctgcgattgagtttttagaaatgattggcgcccacattgccttttagttctagccttatctttgcaggattctcactcatatcacgttactcttatcttgcccttgacacattgcgtttcaaaatatccttctaagtttctaacggtcttctagtattgccgagccaaaaccttctgctaaccaagtagtctgcgattggctgaatgtttattaaacatttgcctcccgtttgcccctggatcacgtggtgtgcgtctggggaagaatccggggtaaaaataggcggacctgtgcccatgtgactctagatacaattagaaatagaccatggagccctggaatgcatctacatgataggtaattatgggttgaagcagcatactaaaacattcttggaaacactaaaccaaaagtaaccggaagcaagatcacgcgcacagaaacaccggcccggtcaccttttgcttatcgcttatcagtgggatacgcaatatcaaaccgggccgagtactattcggcatgttcagttatgcgaaccgactcttggctgcagattgctagggagaagaggcgaatatcaaagcgtcattcaatatccctcgtatacaatgatttttctacccttgacctactctagtagttctccgtagcgttgaaatttcctagaagcctgaaatctggtatagttcaaaggaaacatgaatgatcgcaatgccatccatggatcgtactacatgaaaaatgtcagggcgtcccggccggttaagatgggcctactgaccgtaccggcctggcggttgccaccggctcttacctcttacccaatgagttccaccaacataatctccatatctaaaaggtcgccttcaaccgtagctgttctacttctttagtctttcgttctaagcacttcagagctactttcctctaatagctcacaatactacgtcctcactgctagctatgaaggctgtaccttccgtgcgtgtgcctctcaaggctgccgcccaaacaaccagactagtgagcggcaccagcaactctcgatcctcggtcgcctcagtttcagccaccaacgtatggcaaccacaaacaaaagctccgtctccgctaccacgcaaggcactgacagcgcccctggctaagctgccattgtcatctgtcctacgctcgttgctgattttgtctgtttcctcatcacctctccttctcaagccatgcatctatactctatctttgctggcccatccacgcactgcattttgggatgtctccaaaaacccactgctgaacatgcttgtcaagcaaaccatctataaacaatttaatgctggcgagaacaaaatcgaagtgcaagattcgatcaatcaaatcaaagctctcgggtgccgtggtgtactactgggatatgcccgagaggtccttgtcggagaaaactcggatgccgcgtacgacgtgaaggctgctctggctgagattcagacgtggatggatggcacattgcagacggttgatatggcccaggccggcgactttgtcgctttgaagtatgtgtgataggattcctgttcaatttacaacagccgctaactgaaattcccagattcactggaatgggtaatgacgcgcttcgcctgctgcagtcgcagactatgcccacagaggttatggactcctccatcctcaaggtctgcgatctcgcaatctctcgaggcgttcgcctgctggtcgacgctgaagagcaggccgtgcagcctggcattgaggcctggatcatgaagtatcaaaaatactgcaactcccagacccccggccgtgccatcttctatggaacttaccaagcctacctgcgctctacacctgccactctggcccgtcacctcgagactgctcgtgctgaaggatacacactcggcgtcaagctggttcgcggtgcctacatgaagactgaaccccgccatctcatctgggctgagaaggaggagaccgaccagtgctatgaccaagtcgtcgagtcccttctcactcgcaagtacaattccatgctcaaggctccctcgaaggataccccaaccgaactcccccccttgaatctcatcattgctacccacaaccgtgagtctgttcgcaaggctcatgctctgcgcatgcaacaggctacccgcggcgaggactacggtgttgatcttagctatgctcagctccaaggcatggctgacgaggttagctgtgaattgctcgaaggatttgagagtgccgagaacagtgtcggggctacccccatggatgcccccaacgtcttcaagttgttgacctggggctcggttcaagaatgcatgggtttcttgcttcgtcgcgccgtggagaacaccgaggccgttggccgtactaaggactcccagatcgcaatgatcgccgagttgaagcgtcgcattggcaatgttttcagcaccagcaagtgatattcgagtctttcctgatgtccactttcgaaggatatccagatcgttctgtctttacttcgcagcctacgggttgtttcgctccatttttgcttttgcatttttattcgcgaatagctgggtgcattctgaatggcgttgctactgttttataaggaccttagaagttcactctgatgatgatcaatgaaatcaatgtttcacaatttaaatgactgtattcttggattaatgttagtcaagataggaatcaaattaagaaatcagaccagagagataatctagagataatctaatagttcgaccggcatgattgaggtcgaatcatttggagtgtagtctccaccggaccggcccctcctgaggtcaccacccgatgggctgtcccatctattattctacctctactactcaccccaacgcctctgcttctttcaagtaaaacaaacccgagaaatttgggttttgcgcatttcacaaatatacaatcaaccttggaaacactcaaccaaaatgcatatcctctcggagccagacgtttccaaaatcttccgcggtctaacacaagaccaatgcaacggcttcatctcagcactcggcaatgctctaatcagcataaccaaagaatcaaagccctcaactccagaatccgctaaaaaaatccatcaacccctccgtacagtcttcaccacaagcgatggcaacacctgcatcttcatgccggtatcggacaccgcatccaccggcatcaaagtggtaaccgccagtcccaagggaatccaaggcgtaatcaacatcttcagcccggaaggccgcctccagggcctcctagccgcagcagaagtaacagccttccgcaccgcgctggcaacaatgaccctgttcgtgcgctgcacgaccatccgcaaggacaacgttcttgttctcggaagcggtcggcaggcggagtggcacgcgcgtcttgcgctgctgctgtacccggaccaggtgcggcgagtgacgtttgtaaatcgcggtgcgacgaggctggcggagatggagagggatgttgtctctgagctgcgccggactaatcccgctgttgtctttatcacgcttgctaaggagggtgtctccgactacgagcaacggctgggggaggaactcgctgctgccgatgttattttcagctgtacccctgctacagtcccgaatttcgggtataaggcgctgcaggccaaccccaagccgcgatttatctctcttattggctcgtacaagcctgatatgcatgagattgataccgagacgctgctttctgggggtggcaaggtttatgttgattctaagacggcttgtcttgaagaggctggggagttaatcactgcgggtcttggggaagagcagttgattgagatgggggatcttttgggggcgggcgggatcgtggaggatgtgattaatattcctgctggttgtaacgttgtctacaaatgtgttggtatgggactgatggatcttgttgttggaaagaaggtgcttgatgttggggctgagatggggcttgggactcatgttgatgggttctaatatcttttggtatctctatatttaagcaagagaaacactatcattgatcagaattatgattgaaaagctttggcctcacattgcattcactcctggacgctattgcatactgcaaggacaattcaccaagctactggtaagggtttgtggtcttaaaacttggtgtattaaggtcatcatacaactagttacaccaggcgaacatcctggacactcaaatcaacgcccatttccttgcaggcatcggacagccgtttgtgagcctcataaatcgcaggacggggaatatccccacttgggatttctcgaagtcgttcttcctctccacctatggcgaacaagtgttgaatgaaagtgccgtagatttcaatagtgacgaggctgggaaacatatgcttgagcctcactaagttcaccagctggttgatgatgttgccattgggagcttcgacgcaccattgcgtcacagagagccgctccagagatggtggtaagtgcttagccagtatcaagtgagagactggacatggtcaattatgttgtggtccaatttgggatatactctataccgttaatttctgagaatgtgtgcattgggagctgcaaatgcttcaatacatgaaacttattgaagcgaatgcatccatcagcactcatgttgtagtcggggggcaagggtgtgtagtcgaggcaaagggtgttgagcgagtgtgccttggaggaaatcaaattcataaatgactcgagacagtaaccggtagccacggggtgtgaaccgctgtcctcagagcagaagtacttgaaggacttcaagtttaggcaactgacaataaattcgcgaattccacaaaccgagtgactctggtgcagctcaacatgcgtgatagttgatggttccagtggtaacaggtgtacacatactccactcagcccatatcccttgatcgtgtgcatcgatgaggtttggaaaaaaggattgagacgagagatatcccatgatttgctccaggtttcaattctcggggtttcgcgtacgatatccgatgggaatttgaaaacgacctctcgcagggactgaaacgccggtgtcggcgttggattgaatgggactaggtgttggtaggctttgcgtagcatacaatcagtgaaactggtgctgcggtcaggccagacgcattcaaggtaggtgatatttggtaagaggcagatgacgagagcctgccaagcgatgggtttgtcgtccgttgggatattatacaaccattgtttcagactggaggttgatgattgaccaaactttttgactgactgcttgaagattccatcgaagctccaggttgtgactagggctgtatggtgttgaccacatgtccacattttgcccagcttgagacttttgacttccccagccatggaggggttgtgaagaagaaagtcaacgagtttttccacccgctgagcgcagcagcaaggatcaagttccatatgaataaatgcctgggggtaaagttctgtgtacatgcgtacattgcacctggcgaggttcagtcgatcttgctgcgctgatagatgatccatgatcacaagcagcacctcagtcgggagggtaaccagcgaagacatcttgaattgcgatgaaaggagagcaagcgagagagaaatagagaaagagatggagagacgaagaaaggtgaagcaggtcagataagcccgagcatcctagagagagaatgaaatgaaggaagaagtaggaggatgactgaaagggaaacacgtccagcaggagtcgggagctgtatggtcagtcgcgacatacgcccattatacctagttcttaccataacattgttccgagcctagatgggccatacttacgtccgacagataggtcagcctataaattcttaaagctggtaattgattcgtatgacatttacatgaaataagccatagatatagaacaaaataaagaaaaataaggcaaaggcataaaaattcccaaaacatcgtccaaagccataaataagagaccgatgagcggaggcaaaatgaattcggggcggggatgtgcctttatcgattagcttccctttctctcctcccatggccgtttttccaaatcctgtatattcctggactgaatctattacacttctctctgcattccaatctatccaccctcttctcttttccctagacgatgccctgatccgctgtcacggtaatggacgactcgaccccgacgcccacccagcaaaaacgtcctcgcgtcgccgaagagaaccgcaaacgagctgtccgagcgtatgctatggccctattgtaccaactcaatcgcgtcgtctaacacaatcggttttgcgcaggtgtgatggttgtcgccgggtgaaagagaaatgtgaaggaggtgtgccgtgccggagatgtctgcgatatcgccgccagtgcaattttactcacattgaccccaatgaaaaaacccggtcaacgtctagttcgtaggttggccgcataatcatatccttattgccatctcgaccgctaatggcgcaatatctgataccagacttttggaccgtgcagccgcccaaagtcgaaatgacatcgccgaggcagaacgggtgcgcctgatggaacgtctcctatcgcattatgtacccaatatcactttcgatattcagtctttgcgacaggctgcagaggatctgaaggagaaacaccgccattctgagtccgatgcgatttctacccgggaagatcccaatgagctggaggatcttgccattgatgaggaggattttaccatcaaggctatgccagataatacaacccgtatgttgggatctgggaccatatacaaggatttgttgattgacactatttctcagaatattccggggaattttcgtacttgaatttcacaatgaagatccggaagaagatcgatgaatggatgaagactgcagcacccgaggtaggtttacgtgaattgtcggtgagcaaatactcatgctaaactcaagcccgtaggcaacttccgaagttgagccttttgaagaacgatggagaagtacacaactccagtccgcgtcacctcaggtgtctgcctcaattacatgtctaccgccgcgctatgtcgccgattttcttgtccagatcttcttcaaatacgcacaaaccaataatttctatattgaagaagactggttagtcgagaaattgggtatctgctacaatgaccccgaaagtttatcatttgacgatgcaggcgccgtgtgctgtattcttatggtcctggctgtgggcacccaattcgcacatatggagtcacctacacccgtgaattgcttgcctccaggctctacggcaaatcaagaccatcacttctcggaagacgaagtcggactcacattctaccaatttgcttcgaggcttctaccagacatcatcgccaccgcttcggttcgaagtgtacaggcctgtcttcttattgggacgtacttgcttccgttggatacttcaggcttatgctatacatactttgggctggcactgaaactggctatacaaaacggaatgcatcggaggtatcacggcgaaggcctttctccacgaatgatcgaagtgcgcaatcgcgttttctggacagcttttactattgaaaagcgtataagcattctccacggcagaccatcatcgttgtcggaccccgacgttgatggtcccctgccggttgattttcctggattgatgccagtcaatcaggtctcaaaccatacaaacatggtaacacttattacattgactctgaaacttggggaggtttcaaatgaaattacctcattgcgaaaataccgcaaagggcaacagcaggactgtcttgaacgattactgagtctccggaaacatctcgttgattggtggtcaactctaccagaggaggttacctgtcgtgatctgaatcctgcagggccgcttttcaggtctaatgtccatctcaagctagactactgtctaactcgagtctttattgggcgccctttcctgttcagcaatatcaaaggcatctcccagaacccctcgcaaggcccgtcgtacaaggggtcttctagtctgtccggtctgtcaaagtatcgtgcgactcttgttacagactgcgtggaagcggctttggaaatcatcgatctgtgccgcttgctccgtgatgagaccggtctcgcgcgagcctcgtttaccgaatttagttcatgccgtgcagctttgctagtcatcttagctcagggcctgaccaaacgaactgaaagacttggggctgctctcgaacagggaatttccctgatcaagatcatgtctatgggtgttggctcagcccgttcggctgtcagtgtcatagaggcgctcgaacgtgccattcgtcgtctcgaagcatggagcgagacccagccggatatgagcagcggaggtaccgtcgagtctgcctatgaccggttcaaaaactgggagatgctttggaaagcagggcctatctcgccgtccacggtcgcatggcaacagcaggaagcttttgctccaagtgagcaaaacatcccacaaaacattcgctcccaagcctctacaatggcgggtcctgctactcttcttcatggcatgtccctgacaccttcgtctgcggccatgattggcatgggtagtgctgccccaacacccgttgcacatgatcagagcattccagaaggagaagactcactcaccgacactttctccctctctcatatgccacactttggcttcgatcacttcgtttccaattttccacaagagctgggcgagttcacagctatcccatgcttcgaaccagattcgcaggctcaatctaatgggttgcctcgtgctgaaatgaaggcgctaggtaacaggtctgacccccctcactggctgaatttcatgagggattcatgatcactttttttcctatcatgctttgttcacaagcagcgactcatctatacaacatgtttaggttgggtcttatgactttgattttataccatcttgcgactgttttcacggctatatattgtgcctgggtgatgcaattccgggaaattgtgcactgcttattctcaatgcaactattcatacattgcaatcaatcttttactttgtctaggtcggatgactttaggcttttgtgcacacagagatatcttaatatctgctcattggcttgtgatgatgcttcgagcattgattgatgaatatacataatgcgcataaccctaatcgaatgtaaccttctttcctgcgaaaacagctggtgcctgctccttggccttccgctttgcctcccaagagggatgcaatgggccctcatccttaggcggacctttaggcttaccactagaatgctgcccagagtgaggaccatcagggccatctctgttctgaggccgtccagaaccaccaccgaaaccaccacgtctggcccctctccctcctctcccacctctcccaccgtcagttgcaccgcgcttcgtatcccatccattatctctgccaccatacttcgcagccagctgctcctgcttgacatggtttgcactgacaccgtacttcttctcccacaaagcccgacgcgcctgctgacccatccggttcttacggacaggcttcgcaccggaattttcctcatcggtggcttcttccgaaccagaccagtaaccgccgttcattaaagatggtaggaatgtcgtggttttcactgctgcagcagagcccttcgttgcctttgctttcttaggtggcggggagtctccggcggagaatgagggtgagggagaacgggagatagaaccggagatatcgtctgcggcggggtcttcctcgtcgccagattccgagtcagcttcggagtctgagccaggtccaagtcgtgagttgaactgtgagaggtcctcgtctccggattcgtctgagccggagatgtccatgtcgtgagccgggcgggagacctgctcgccgcgcctaggttttgtcgtcactgcctctgattcagactcggatccgctttgttcctttcgcggcttctttgccagcacatcctctttgttgtcctcttttttcgccttgctagtcggcagctcgtcgactctcagtagtttccgaatgccggccatgattccaggcatttccttctgcaccggagtggatttgaacagtcgcgccaggatattcgcttcggcggtactctttggtccctcctgggagaccttcttgactgcctggaactccccgaatgtccgcgtctctgcaatccgtttcgtcctgataagttgtttgaacaggtatcgctccgatgtgacatggtaatcgagaccctatgagaacagatattagcaatcaagttcctaagcgagaccctccggagagccgtctgtccagtggaaaaaaaagccactgtaactaggtaccttcaaagtctcgatctcttcctttagtcgcgccaacgccttatcgtccttttgcgccttggctgtcttctctcgccgactgagcttttgtcgctcaaagccgcgcgatgtcttgagaccacgcattatcatcaatacaccattttcgaacatttgcgtcaaccgggttccgtgaatggacattttgcgggtgtcgctcgaccgcgcggggccgctgacttcatcgagcttgcgtttgggcatttctctctgtgctatgattgtatgagtattcggggtagtgaaatgagtgattcaaaaaattaatggctcgttgaacaaaaaaggaaggcagtttcgaggatggtggtgatcgtcggatgttggtgtagcttaatttttttttcttgggcggatcccggcgccaagacagacgcttgcaatgaccaaattgatatctcgttcggggtacttcgtactgtaaattggacaataaaaaaaaataaaaaaaccgaatatttattaccaactaccgagggctaattagcttataaatgagctggggcaacttgaccgctacaatacgttgcttgatatattgcttgggaagaccatcgattaacactgacggatatgtacatacaaacatggcaaagaaaataatacgcgaacagaacctttctatttcttttcttcctccttctcttccggcttgggggtcggaagcttgaactatagttgaataggttaggaccttgtctttcagcaaggaagataatgtgacttacggattcgggagtgcggttttcacccgcacccacgggctcccagctagtagagccgctttcaaagttacggaaggcctgggtgagctcaaggggctcaataacgatgcgcttcttctcttcgtcatagcgcagctcagtataaccggtcaaggggaagtccttgcgcagtgggtggccgtcgaagccgtaatcggtcatgatacggcgcaggtcaggatggccggtgaagaacacaccgaacaggtcgtatacttcacgctcgtaccacaaagcaccctcgaagagaccagtcacactgggcacgggagttgcctcatccgcgtaggtcttgacacggatacgggagttgtgacgaacgctaagcatgttgtagacgacctcaaatcgctgatcgcgggtcgggaagtcgacagccgtgatatcggagatctgggtgaactcggcggcagtgtggttcttgaggaagctaatcacgggaaggataccagcgggagcggtatacactgtgagctcatccttccacactgtgaactgctggacatatttgggcagacaagacatgacgtactgcccataggcgtgaaggctgtcggccatgggctggtacttgtcggtagggttgaccacgggggcgcgcagaggtcccggggctggcaaaacacagttcggttagctcaatttgtcctatctatcggctcgtccattgcacatacgcgggcgctgcgcctggcgcatgttctcaggttccgggcccggtgctgtcgaggccttgggggcccactgaagggaggcggaggaaaaggtgcgggcggccatggacctcgtggcggatgccacagagcgtccagaacccaggcgcatcaaagagcgtgcggaggccattgtgtagagggagcaatggcagatgcaacgtgaggaggggacgaaggcacgtaagtcggattgtgaaggtttagagtggtcgagcactttagtcacgtgttgggcacccgctaaactggatcgggcaatgccagcaaaatgaagccgcgcttcaatttccttccttcttctccatcaatcatctccaccatttcttttcccctctcttcttctcgctcctcctcaaacatctaattaccgttcgcctttctacactttacagggcagcgtatttcttttattttctcagtttttcatccaatttgatcaggtgtcggcgtttgagatctcgtgtccctctccggttatcaccgtattccccgcgatcatgtccagtctttcattgatcgattccgtcatcgacgacgacgatgagttttggtacgtctcgaagctcactcaacccgcgcgatctgtgtactgatcaccccacagccccctgtgcattgaagagttcgatctctccgataagaatttcaaaccgtgtccttgtggatatcaggtatgtccgtctgatcaaggattttcacgcgtctcagcagtacttgctttgttatggcagggacagatggctcgtctttgtttctctctagcagacctgactgacatgtgatttttttttttttagatttgccaattctgctacaacaacattaagacgcagaatgaagaaggccgatgccccaactgtcggcgcggatacgacgaaagtaccatccagtacaagattcccgacgttgaggagtgagttatccgatgctctgtgatatctgagccacatcccaactaacctgctgtgtttaggttcaaggcagatctcgcactgaaacatcgcaaagcagctgctgcgaaaaagaaggaagccgaaaagcgtgaaatcgaagcctccagccggaagaacttggccggtgtccgtgttgtccaaaagaacttggtctacgttatcggcctcaaccctacgatccgagacgaaaatcaactccttcaaacgcttcgtggacgggaatatttcggtcaatatggcgagattgaaaagatcgtggtcagcaaggctaagcccggtggtaaccccaaccagggaattggtgtttatgtgactttctcgcgcaaaattgatgctgcgatgtgcatcaacgccgtggacggttctgggaacggcgatcgggtgctcagggcgcaatacggaacaaccaaatattgctcatccttccttcgcaatgagcaatgcaataatcggaactgcactttcttgcacgagactggggaggacagcgacagctacagccgccaggacctctcatctatgaactccatatccactcaacgcccaaatctcccacctaccccctctcacgtgaggtccgctcaacccatcgcccatcctatgcgccggcaacctagcaaggatgagtcgatcagtagtcgcaccggcataccagatggcccggctctcccgtcaactgcaagttgggctaacaaagatgctgctattcaccgaaccagaaggactagtctcacgggtagccaagcctccaacaatagcccacggcccgcaagtgccaatgttgcgacactagtcgaagaaccgaaacgaccagagaagccatcgccgatttctcaagaagccccacaatcaatttctcaagtcgatccccgatctcccgccgcgccaccacgtccccgtcgggggactcaacctcccaagctgccatcaccgtttgacggcttgctcaaggatatgaactcggcggatttcaagttttccttcagcacggctgaactgagtgccgaagaggtcaagttgattaaggattacccatctttcatcgatccatatggcggggtcaagcgcagagcaatgcgagagaaagtcgaacaagagcgtcttagccgcgagcacgagttgcttcaatccgttgcagctgaagaggataaccgtgaagctggtagcctccagctaggtggtgagccagaagaaatcaatcccccgcgcagtcgccagacgcgcgagtctcatggggctatccagccgccctcgcagcaggacacggcggataactcaactgttggatccccagtttctgcgactagccatcaattccaaggcctgaacctcgctggacgaagcttaactcccttgcagcaacagcagttgatgttactcaagtccgccggtaatcaacaagctggcctggctgaccctctcggctctgccgctctggaccaagccgcccatgtccgccaaggccttgtccacaatcagatggcacagttcaatgcgctgcaggcagcacagaaccgacagtcttcccgattttccttcgccaatgaggccggttctaagaatattcctaacgcgcgcatgttgggccagatgcaatcttcttctcccaaccctctttctgctcctagccctcaacatagtcttgcagcaagtggcttctatgctagcggagtgcagggtcccccaccgggactgaagacggctggtacccctccgattagtggtggtggaatgttcgcccaaggacatggcttcacctctgggcttggtggtaatggaggaaagcaagatccaactccggagttaatgcgagagctactgcgtggacgaaatggtacgaatgttagtggtttacagggccaggaggcggctaagcgtgagttcatgttcccttttcttcaacagcacaataccccaccccctatgactcctgtcaatggccttctcagctccttctatgggcaccaagcgggcgtgatgcctgattccggtggcccacagaagcagaagaagaaggggaagaagcacagacacgctaacacttcctccggtggaggtggtgtagtagatcttgcggacccgagcattttgcaggcgaggatgcatcaagtcggcgcgaatgctactgctgggcaagcgttgtacgggagtcagggccaaggtgggtacaacccctccatggtgtacggtggtggcatcagtcggtggtgaatccccgcggtttcacttgttcccgtgactggcttcctgcattttcctgttcgctttttcgctatgacattctgcccttgatgggcctgctttatcctgatgacatgatatcaattccctttctttcctccccgtggaggaggtcttgcatttgttgtttctgttttattcgcggtcaggctggcagctctgatttatgcgatgggctggacggtcacctggcgtactagggctttcccttgtctccttcaattgctatctatttcttgcatgctttctctggctctttccaggtgtctttgcatttcatggacatactggcgtgtgttccgagctcctgtattcggcggctgtgtattccctttctacttttttgcatccggacttccattatacgatctgctgccctgctgcgtcttgaagaccgcaggtggtgtttattatggattagtgtacgttaagatctccctaccctgataccacaagccgaaaagggtcttattcgaaatcagtctcctcacagccgccgtttacatagacgctatgtcctgcaatgttcctggtccaggagatgcccatcatgtaattacctcgtgatcgtttttgtatcttcgcttaaatccgctgctgctgcttagtcgcccttactaaagggatttatttctatccctctcatctgcccagtcacattgccacattttactttcttggacattcgctaacccaatgctctagtgaatgaggacttccctcctcttggagatcaatccaaggatcgacgacctgttgacagctttgggtttttgaagtctcagttacctggcgagtcggccgctcgtgttgggactcctacactcccacctggactgcctttacctcacgctcatccctcgtcttctgtattccaggaccacagttcctctaaaccttcgtctcctgccccaatgctcccacctggcttgacgcccaacatttcgcgactcaacagcccatcgcagagtcgtatggacagtccctctcgtcttttgagtcctgaactcacagtgggtggacctttgacatcaagccgcgtgaaggacgcttctcaaatatctttcggatcacctgtacaaaagtccgccactaaggctcgtaaccaacgcaaaagccagttcaatattggatctgatttcaaagattcgcctgcaaagattgcataccagttgcaggagagttctgccactacgaaaggcaccccgctcgactttggcgccccactacccacgtccatcaagactgagcaggcacgacctcctagctctgtttccgtcatcgggtcgcggcccgacacgccgcaaaccatcgcatctcgcctatctgactcccctgcccctcgtcagcctcgtattctgcgtgtggtagaaaccccgaagacagaaactcctcctattctcaccgcaccatctgtgtccgcttctgttgttggtggaaccaggtcccgctctaggagacagagcatctcgtcaaccagcatccccggaactcctgctgatatgggttgggacgctgattactatccttccacttctgcttctcgtgcgaattctcctcctgcctcttctcgtatcggctccgctcccgttcgcgccatgaccaagagccaggttaagaaggaacggaaacaaaaggcaaaagaggctgaggctaagaaggtagaaaccgcgcttgtgaatgaggagcctgttcaagcacctatcatggggcgaaagcgcaagaccaagaaagcccccacggccgccccccccccccccccccccgccccccccccccccgcccccgggcnnnnnnnnnnnnnnnnnnnnnnnnnnnnnnnnnnnnnnnnnnnnnnnnnnnnnnnnnnnnnnnnnnnnnnnnnnnnnnnnnnnnnnnnnnnnnnnnnnnnnnnnnnnnnnnnnnnnnnnnnnnnnnnnnnnnnnnnnnnnnnnnnnnnnnnnnnnnnnnnnnnnnnnnnnnnnnnncccccggcccgccactgtcagcacagctgatgcacccgctgccagtggcccggaaaagtcgagctctctaaaaccagtgaacgttccttcagtcaaggctgaacccaaggtggatacagcaaagaaagtgaaagccaaagagaccaagcccgtcagagagcctaccccaccccctgtcgaagagcttcctgttcagaaggaagcccccgtagagccatggcgttcaaacaatacagttggacggttggtcaaggactccgaggcccttggaagggcaatcaaggatcttttcatggaacgaacgaagcctcttcacgagttgctcgctgagatgcataagtccggcgaacttgatctcaataagagctccctcttcaaccctagcaacctcagccagcgcaccgacatgaagtgcactgcggaggactacgattatctccagtgtcccaacgaattgactgaggaggatcggaaaactctacttcgtggagagcccgttcgaattggcgatgatttcctcaaaactcgatgccttatcacaccccgcggctgcgtcctacgccacctcgaaccagaagaggaggaacgatacctagagcttgagaagaacatgactggtgtctcagatgctttcatgattggggacgacgcaagcaatcccagcgggggcctggaagcactcttcgcgaacccggagaagttcaacatctgctgggtcgacgacatgcccactcgcctaggtgccacgtccccgtcatcttctcttgaggcggcggaatccgtgattccgcctaatgtcctctcggccatggaagcagacagcacccgcaaccatgactgggctgtcgccaactcggcagaatttctcaacaccacccctgctgccgtgcgctccttcgccgcagtcaccgcgcagcacatgctgggtaatccgggcatggttggcaccaaccccactctcgacgacgttgctggtttgaccaacgaggaactgaaggagctctctggtcgttctcaaaaggacctcgagctcacccggaaagaaatggattcgctcgacaagaagttcgcagctctgcttcgacgcaacaagaagcttcagcagcaggcattgaatcttgctgctgggccggaagtgtaatcatccgcactatcctggaccggagctctcagttccctttgcaatcgcagcttcctgggtggacttaaatctccttgcatgtacatctatctaagcctgaatgaatcattgtagaatacttgttacatctgtcgacgtgcgttctagtaatctaatttccaacccttccatgaaatatgcaccttctaggcctatcctcacctggctcgcaatgagacaacttgattctttaacgccaagtgaatatcggcacatatccgaagttgactcttaccagttttgtgtctgatatatataccctacctgcctgccatcatgatttcaaccaacaaattaaagacgaaacctaccccgtccactaagttatagtagttaaagtgagaaaacatatcgaattccaattatcatcggctaacatggctcagaacatcaatgtctacaggtcaataggggaatgcgtcaagggatcaatcaccgactccgccagggctggatctgtcaacctccacattcctctactccgtacattttaatcaagactagacatttaatgaaggctcgttcctccgaagggatccaacattagctgattcttggcatcacacgctccttgacgattcaggttcaaggtggttgtctagtcctgaaacatgtggctgatttccgttattcctaaatatgtcaagtctctcacttctttcggtctggtacaatagggattgaggctgatacttgacgcttctgtcgctatccgatccctttcttccccatgggagattattttctcgactttctcggctggcatgtataatgcgtaactcactgagtatactatttcccgccttgttagtctttatttcttcactgcgctcatttctacatcattggccctctctggtgctatattcatccgtttgtttgttcacgttcaaacactacgatgtttcaattactttctgtgatagctactctgtttacactagcctcaactgccatatcgaccggcctactagtaccactatacgcctggcccggaacagacaaatggaatacactctacgactcaattgcagcccatccatcaatcccattctacttgatcatcaacccgtccacgggtcctggtgacacagaatacccagaagacgtcttcataaccgccatcgccaagctaaacagctatcccaacacgaaaatactaggatacacctacacaaaccaaggaacgcgagacagctccgaagtcgaaaaggacatcgctatctacgctaaatgggccagctatgcagggcagaatatcactctctccgggaccttcttcgacgaggcagcgaacggcgaagatccgagcaagctcgcctatttcgagaacctctctcggaaatctaagagcggtaacttgaccaccgttatcttcaaccctggtgtcaagctcgtggcagatgttgccaagtggttcgcggcagcggacttcattgtggagtatgagaatacttatgctagttgggtggcttcggctcctgatgatcgcttctcgacgcctgataactatggaagggatgctgttatcttgaatcagacgcccgaagatgccaatattgataatgttgttcggttggcgaaggatatgggcctcggtgctatatatctggcttcggatgataattatatgaatctcaccactgtgactaaggttgcaggtgctgtcgcacaaaatcagattgttaggcgcagggggtaccgtcggtttcagagctgagtatataagatcatttttatgtcagagtgcatgtggtcgagtgctattttgggttgtttatatagaaaccacggaagattccataaaccaatgcaaccgggatacatcactttctgggaatcttcgaaatctatatggatatggctctcgtgttagaacgctctaacgccctgaggtttacatgtatattttgtagaagcaagtcatctcaatccagaccgttaatcccatctttatacggccgcaggtcatactcatcaggatatgtttccaagatgcgcttgagctccgtcatctgctccctctgctcttccgtaatctcctcataaacatcagcaaatgcctccctaagcgagggcttcttctcctgctccgccgcgccaaactccctaagtaccgccttgcgcatctgatctcgcgcctccttctcctgctcctcactccaaagcccctgattctcaagccacttccgtagccgaatgataggattatcacgacgtttccaatcctcaacctcgacgcgggcgcggtacgcaaagctgtcatcgctggtactatggtgcgagacacggtagctcatggcttcaattagcacaggccgtccgccctcgcttagggcaagtcggcgcgcttctttcatcgcttcgtttactgcgaagacgtcgtttccgtctacgcgaatcgtgtcgatgccgtaccccacgccgcggctggcgattccatcgccccggtattgctctagcgttggcgttgagattgcgtaaccgttgtttcggcatataaagacaaccgggcaagaccgtgtagcggcgatgtttagcgcggcgtggaagtctccttcgctggcggctccttcgccgaaatagcaggccacgatgcgtgggtcccggtttgggttctggaggtcttggagtttcagcgcataggctgcaccggcagcttggggaatttgtgtggctaatggggatgagattgtgtgctgttgggtataatgttaagaaaagtagattgatgtaaagaggtggtggtactcacaatgcggggatagttttgtccatagtgaactggcatattccgaccacggcctgtatcattgctattggcaaagagctggctcatgaagttctttagggtgaatccacgttgttggaatacaccggcttcgcgatattgtgcaaagaccacatcgtctggtgtcaacgccgcggcggatccaactgtgatcccttcttcgccggcggaaacctgcaggtagacggtcagatgagttattttctttatttaaatcttaagtaattgaacgtaccatgtagaaacttaagcggccctgccgttgtgcctcgaacatgaccacatccataatgcttactgcacgctaaaagttaggtacttgatagcgcatcaagcgtggggtaaccaaccagatagcatatttttgtaccatgtcaagacctcctcattcgtaacatcaggtgccggtctcttcttatcaacctggcgaccgtctgagtccatcactcggtaggtagggatagcgggcagatccgaggctttgaggaaggccatctccgaggtgaacttgctgttcacggccccagggaatcgaacactaaacaaatcaacatctcgtcagcgtttctccaaaaaaagaaaaacgttgtcctcggagcgatcacctgtctgaccccggcggctgcgagatggagctactccacctccgtgcggggacgatgcgcgctgtagttatgggctggctgcggaggccaccccgggtcaggagctttagagacattttgctctctgatgctattaacattttagattcaatttgtttcaatggtaaaaagtgagagatcccaaggtctttgaatgttaaatctgggggatgcggagagcggttggcgtcggcatcttagcgtcactccgcggccaaccgagtatccggttgatgcggggaagataattctacaaccacattgagagtgaacaaaacatcattggaagatctcaattgattgtgtcctttgtattcttatttcttccctagcataaggcctcaaatctcacatctcacatggctccccagcggtggggctcaaatccctcgcgtatcatatcctacattgcgacagggatgagagagagtcaattcgttcctcctctacctattgatggtcgaataattcagagcggtggattgcgacgatgttggcagatgtatcatagatcacaaagttgagttacgtgactacctgttcttcagatccctacgtcaattattctacttcccggatgtcgtagtagccctggagtccaagacccatcttgtcgaggactatacgcttcagggcatcggtgatagtcgtatccctttctagaactgggcctgttggaagattccactatccatatgtggccgtgccggtggcacgcttcagatgtaggacggtaaattgcccgttctcttgtaccggaagtctgctacaccgacgcgccattgtttattttatccaggggtaagtctgagattctggcgccgatgcttgtattccatggttagatggacaagttggtatgagaggatagagacggcgctgattggaggaaagttgaagttacaccaagggcaataaatactgtttgctattttgtttgctattttgttctctgtttaccacaaaagttgtctccttcattgtctaagacttagatgagtataaagccaagcacagccgagtgtataaaatgagtcaaaactaccaagaagggggtaaattgaacatatctaaagacattcaaaaagatatctaactttttttggaaaaagcccattgaaaatatttcatgtaactattctctataaagtccacgggtgttcctaatgaggtcggatatgatgacatcggtgcctgtgtaccagcctttgaggcttcggctccactatcggatggagacgatgacatagttggaatcgctttcctaagaatcttcaactttgctttctgtcttcaattctttgtacaatcatgtccaaaaccgatcaattccgcgaggtattgaataccgacatcaggactcctattcccgaggagctcgtaaccaggatctcatccctgccgccatttatccctataccgggtgtctccaactttcgcgatctgagccatgataacaacaaagtacgtccgggattcgtgtatcgttcgggaaacctgtcaaacatcttcggttctgggaaatccatcatcgcaaccgaattgggaatcaccacaattttcgacctccggaatgaaggcgagcggcaaagagccccttcaccctctatcccaggagtcgagacgatatggctaccatacggagatcgaccggccactttgaatctccgcgattttgcgggcgaagacaagggcgcccaagggttcgtgaagatgtacttcgggatcctcgaagcggctgtcccatgtctcaccgagatattcaagcatatcagagataacccagacgacccgttcatcgtccattgctcaggtacgtgccacgtgtatcaccttgctctcatggctattttcgtatagttgcgtgcaaaatcccattcataatcgacaaatgctaaccataggtttccgtctatagccggtaaggaccgaacgggtgttttcgcctctcttgtcctcctcctaatcaatcgaccccatgaggatattatcaacgattatatcctcactcgagttgtaatggaaggcgccagggataacctcatggaggcattcgcggtaaacacagaaaccggtgaagccgacttcagccaattgagccccgaggcactgggtatgcttgaaatgtgtggtgctcgagccagctctatggaggctttcctggtatcatttgagaattcctataaaaatggtgtcgagggctatctcatggataaacttgggttctcacagagtgatctatcgacaatgcgtaagaacctgacctagcggatcaaccgcgagcatctgtaaatatataaacaagcatgtacagagtatttatatattactgcattggctatatttgaaattagaccaactccaaggtgctagctctgatttcatattcttcgtgtcaatatttcagcgccgagagctaatcgatcttctcctagatgggaagttgtcgagggctgtatcgacggcgccaacttgcaaatacggaattggtacatgcgcggcggataggaggctgcgcgaaggtcccgtctcaggagactcattccgcgtcttccgaatactagttatattgtagacagagcaatatgggatacaaagcatgaattaaattgagttgttgactgagagagggtagaaaagatcgtatccgccttaggcaggaaggtggctcaggatgatacgttaggatggtacttttgtgtaggtcacctgctcatttccagtccgatatcctgccataatcagtattcttctgtcagcttcttccctcctacttgtagtgttaactatggttgactttccttatccatacgacactgactaattcatatcaatatttgcgtgcattatgtctgtctctctaacttatactaccaagtttatcggcatctactagcattgtagatagccgtggcatcagtgaggaacttgtcaaacgccccgtcaccggtagccgggacgatcgacttaggaaggtcctcaccgtcggcattacggtcatcgacagtcttagccttcgtcttctcaacccacttcttggcagacttgaactcggcatctgctgtacaatgatcattgtcatcgatcgcctcgagcatagcaatcaagtgcttgcaagcagttgcccactgcttagcgacagtcgtccagggtgccacgtccgtggcaaaggccttcgtggccattttggggagaacatcggggatgctgatgatgagtgcgaggcgatctttcaacgcctcggttccgtcactggaaccggttctgcgaccggcccagaaagctgtaatgtccttggtaagcttgggcgcattgacctcaggactttgatatggccagttctggttgaggtctgtgaatgtgataagtgagttgtgaacggttgtgtcactccctgaaagctcccataggcttgcattcatagacttggtggcgttgtacgatggcgcgttccacgtatagtctccatagttggcgagtgcgatcatagaggcgtatggttggttcatcgggttcgaggtgaagccaaccagacgcttgtataattcggcggcacgctttgtgagcgggttgaggaataggcggtcacggttgttgtcgttgactgggaagttgtcccataggaaaaggttgtcggtgacgtagctcgagtgggctctcacgatactttcgactgtgatattgtcgctgaatattccttcgccagtccactgaacgcggatcttcttgttcagcttggtgccgaattctttcttgtaaggggtaggtgcactgccggcgtagtcggtcgggacggtctcgaggtcttcaagatcgtttggctcaatgtattgcgtctgtacacggttcagatagaatgcctgggcgtcggcaacccattcatcattctcggtttccggccacttcttcttgtccgcatcgcaatggaactcaagggcgatatcatcgagagggatgtagaagctgctgataccaaagtcacgcagctggttaaacttggtgacagtagcgttgaagtcctcgtcagatgagtaacatacgtctaggccgggcgatagagcataggtgaagtcgacatgattgatatttgcagtctggacaagttccttgagctgggtaagctcgtcgccgctgtaaagagtacgccatttggcgcggagaagtggatcatacttgggcgtgtagacataggtgttcattttatgctttccgtggaattcaaactggtcgagacgcgcctcatgggaccaggggacaccgtagaaaccctcgatcgagccacggatagacatgagcggccagtcgcgcaccttgacaccgggaatatggtcatcggcgagaagttgacgaagagtctgtgccgcatagaatgtgccgcgggtgtctacaccgtttattacaatgcttggctgttgctcatacttgccagatgcaagaacatagccgtcagcgtcgaggccattcgcggaatttccagcaagagccttggcagcagcgacagcgactccggcttccgcctctgtgccaacaaaaatctgtgtacccttactgctgggcttggaggcaagaacagcatcaccaccggcagcagccacaactcccttgaccgtagagatcgtagcggagtccttgaaattgtccgtcacgattgtgacattacccgtgagcgatacctttccgcccgtgaacgtgatttcttgcggagtgggccaaaccgcggggcctccatcatcatgtataacaaggtcgctgtggtcaattgatgcagcattgacaggcccaagcgcaaaagccagaagaaaagcccgaaggcaggtaatgcgatgtgaactgaacattgtgtggagaagtatcatgctcaagggcgtggtttataccaagaaaggtgatcacgacgtgtttattgatgacttgcaagattggaagttacgatgccacgatcgattacatcatggcgaggagagtgcagtatcggggtttgatttgatttgattatttatcaggtcgtatgcagccccgatgcatactaagcagcaatttagcagagggtatttcgggtatgccagaagataaaatatagggaatagtgtttcaggtgataatgttcgcaaggggcagtgctctacgatataagacagagagcgaacctgcgacgattcacaattcacctcctcccgctcgtaacctcggaacgtagcgcgtctatcgtaatattatagcgagataacctggcgtcgccgatcgttgattgggtggacacaagtacaaccttgtagatcgtcagatatcgataccccaagccacaattgttaaagaataatttagatatctcgccgaaatacgcttaagcccttaaaagcctaaagtctccatgggctataaccttaaaattgcgtggtaaacgagataaagtatgtgaattgaatatattccggtagagctgctagaattaggacttggtatgacagatggggatttcttgatgagaataatgggcattaacgacgtgagacttcaatgatctgatctatccagctcaaggcaatagctgtttggatattattccgctataccactgtttcgattcagtgatatatagtacgttttcctggtcgaggttgatatatgcaaagcgctgttattaatgaaggttactgcctcttccaacgaactagttatacttcggaagcataattttcttccaagaccatctggacctatccacctgcatcaagactaacctgctctgagccaaagggaaaccttccctttcagcctagatccgaataggtaaatgatatactatccccacatcactacggggtaagaacaagaaactagtaccggtgaaaacccactggagccatagactatcctatagacccggtcgaagctcggaccgaatgactgccgatgtaaatagacagctctggatttctcggcaagtgccattcgtactgctaaaatggctgaatggatatttactgcgttaaattcaaccctaaaaatgaaagctgggtcgtcaagctagtgatgctagtgtagtggatcgctttcatactagggacgaaccaaaacatacatcaacatcaatcctatcgtttggatctatgtttgttctgagatattcactgacgtgaaaaaataacaagggacatcattgcattcgtcaatatatgagtatgttatcattgtaagattgcgccaaaaaaaaccctaactggcatgtaaatgcatcccaaaaccattatgcagagagcttgattgagaataaagtttgtgccccttctttaccacttgttgtcaaaagctttgccgtcaatgtagttaatcagctcctttactgggggcagatgatcgcgaccagcgccaaacaacatgccctgacgcaaaactttgcggtagttcttgcccggagacaccttaccgagaacatattcttggcgagtctcgactcgagtggggacagggatagaacggccgacgacagcctccattccctgccaagcaaacgtaatggcctccttcgcgccaccagggataccagcctcgtcaagcatcataatgcgtgtgttggggtaattctcctggataaaggcggcgatgttggggttataggctccaccaccgcacatgaatatttcggcgatctcaaggcccttgggagcatagcgacggtaatggtccacgatggcctgggcggtaacacgggttatggtggcgacgacatcgtcaggcttgagccctttggcctcagccttagcgatgaattcataggcaagagtgtcacggaagacttctcgaccggttgtcttggggggttccaacgcaaagtagggatgtgtcaggaagtcatccacaagtccctggtcgacggcaccgcgggctcccatctcgccgtcctgatcgtattcgcgctcgccgttagtatagtggcgaactacggcatcgatgaacacgtttcctggaccggtgtcgaagtcgtagcaggcatcgacaccgccgtggctgtccgggagcacaaagcagacatttgcgatgccgccgatattctggcatgcacgcagctttgtcgggtggtgtagcaccagcgcgtcgaaaaaggcaatgaggggtgctccctgacgtccagctgcctgatcactcactcggaaatcggtgaccgaggtgatgcccgtgcgcgaggctaggaatgtgccttcagccatagtcaaagcgctgcgggtctcaccggcttctggcatggagagtagccagatggtttggccatgagatccgaggacgtcaattgatttgatgtccacattgtaatccttacagaactggtgcacggccgaggcaaaggtctcgcccagaatcacattgacctctgacagctcggaaggggatgtcttattatgcaggatcatgttcatcacccgcttcttgatcaccggctcaagtggaatttcaccatactgcgtcattggtcagcatgtcgtaccctgtgcagcattcacgtaggcagtggtacttgccttgagtagttcgaagtgcataggcgattccggggtctcctggcagaatcggcaaagggcgcaatcaatgccatcctagagctgatgagcgtggtgtttctcgagtgaacagacggccacccaccatcgaggttccgctattcagccccagaactgtgatgtctaaactatggctggaagtgccattgacagagttgatcaccatgttggattccaatttgcgaattcaaacgatcggaatttttttttaaaagaaacatcgtgaggatcaagacactatttaagacccggtccctaaccggaacccataatgaaccaaccggtagatggtggagacagaatattcgcgtcggcattctcaatctctctgatagatctaatattggttagcaacaagggcagaagggatgaccggcaaaacgcctattaggaaagaaaatgataaatggctacacgcttgtgggcttggcccccgcatgaacagctccatcgcgccccccggtcttaccaagcttggccttcagattcttcaccaaatgccgggggcgggtccaattgcaaggattactcgagatcgcgtattttttgcttttggcgatctggggaagtggcttaccatataacatggggtataccacactctggaagcgactttcgccacgtcagctgaatgtcgccatccagatattctccctgattctcaatcttcttcgagggttatgaccagggtgtgatgggtggtgttaacagctccccgagatatgtaacagaagttggcatcggtagacctgatgggactgtgaccaacaccactcaccaggggggcattgtcagcgtctattacctgggtgcgatcttcggttgcttcgctggcgggtggcttgcagatcgtgttggtcggatcaacggcctactcgctgggtcattatttgcgctgatcggtggcgcgctgcaggcgggcgctcagaattccaacttcatgctgtgtgctagggtggttacagggattgggaccgggggtgagaatggatccctgctagtcttgcctcggggctggaaggagctacgattttaatttgtcatttcacagccttgactgggattaccccggtgttggtgtctgagacctcttctgcgaaccaccgcggcggctttctgggctatgtgttcattgccaattgtgagtcgttgattcgcgatatccactgtgggggccattgctgacatgcatgaacttcaagatctaggtatatccatggcatattggatctccttcggcctcgctttcgtcgataacggttactcggacgtacgatggcgcttcctcctcgcctttcagtgtttcccggcactcatactagtttcctttatcaaaatgttaccggatagccctcgctatctggcctcggtggggcggaatgatgaggctcgagacctcttgaatcgtattcgcaaagatcgggcatcgcaggaagatatcgaccgagaataccttgagattatagtgaccgcacagggaagcaagcgcagctcgcccactgaatttggaatgatcctaattggaaaaagtgaaaaaccagggctaaatcttggtcgacgagcttggttgtgtgtttggcttcagattatggcgtcctggacgggtattacggtgagctacggcgctcacaatcggtcccttggacaattattggggtactaatagtaattgtaggctgtgactgcctattccccgacactgcttgctcaagcaggctatagtgatataaagcaaaacggtcttgctggaggaatcaacacaattggaattataggtaccattatcagtgctcaaataatcgatcgattaggccgacgggtgtgtctgatgggcggagcagctattttatctgcagtcaacttaattgtgattatttcttctgccgctcgaagtgctttctcctgacaattttataggctggagctgtttatgaaggttccctgcataatcctgaaaaagcatctcaatttgcgcctggtgctgtgaccatgctctttttgttcaatttggggtaagtctgaaatgcgacacttcttgtcatatgtactaaagtgtaaccagttatgctgctacctggggtacggtcgctttcttgattcccactgagatattccccagtgatctacgcgcccaaggcaatggctttggtattacagggtgggcaattggggttggtatgaccactttagtcaacccgatcatgtttaatgtcatgactgtaagcttccccgacttcacacttgaattgaaatactgacgaccgcttagagccgtacatactttttgtttgctggccttaacctcatctggatcccgatcgtctacctatgtaggtttttgatctcgtattcatccacttttagttctgagatctaacatgattttcttcgcagtctaccctgaaactcgcgaccgctctctcgagtccatcgacgctcttttttcgacgtccagtccattctactggaagatggaacaagcctataaactccatggcgatgtcctcgccgaacacggagtaaatatgagtgaggtctctcagtggcggcaagacacaaactgaacttgcgactgtcaatttacgttataccatatagagccttgatcgtgtcacctacgcttgcacatgtataacatcatgtacccgatgttgttaccccgcacttaatgtattatatagaggttgtattcacacctttctatttgtttttcatttctttctcacttattactggtaggtcatgacttttatataaaccacatttagtcgaaatctatatatacatgccgtcttggtaaacagtatatacatgatattctccaatttctatgatctgcagcattataaattagtataattacatcttctcgcgatgattgccgaaacatccaccgcattcgatcccggcatcaacctgaaatgacacgctgctgagtcagcttttgtggcttgtaactccaatgccgactttgatcctcttcatttctaggattcaattgcgcatctatgtcatcggagaaatttactgcttcagcttgatcgcaatttttttttgcctttttcccattctgcacaggcctaccccacgatttagtacacgcgacccgtgtctctgtgcagaccccgaaacccgtttctcgaccgaagctcccgaggtcggggcccacgaattgtcacccgcttccttgcgcctgagcccaattcccgaggttggaatgaactaatgaattgaatgtcgcaaaaaccccgaaagcttcaacgcgtctccaaagcctgtaagatccccacgttgaattgtatactttcctcgcgcttggcggcaatatccccccccgaactgtactagaaagcttggagctcatgttgcatccataggcgacttctgcaacagacgcagcattaaatgcggcaggagtgcagacccgctaggcagatgtcagaattgtgcggattttgacgtcccgtgcacctttgatcgccccgcgaagcgccggggcgtcaaggctggcaccagggcttctatgcgagagactccgttggtagaaacgcctgcccccgagaatgtcctccctgtaccgcctacagggcggatgtcaaactcctctgtgtctaggagctacagcgagtccgcccaccgcccgtcattgactggggacccatggtctaccttcaatgttggtggcgtggcaacggaagtgtatgatgatgatagcgcattgcgaaactcatggaatgcatttgccattgccagtgatcgtcaaatccgaaatctcgtgcaggtatacttcgagattgtgtatccaatgtacgaatcgaccttactgccctttcccttttctatggctgataaattcgcagattcccgcttttccacaagcaatcttttattgaaagagttaataaccaagagcacctccgaaatccggggttgtttgcctctacaatggctgtctgtgcgttagtttcgggacgcgcccgagacggcgcattgttcactaatagatggcatcgcgaagaacttgccgaacctccatctgaggcattttatgctgcagcgaaagattctattccccgagaccttgcagcggcaagaggcattaactatatgcgtgcatgcgccattctcgcaattgccagcattcaaaatggccagatcaagaatatgcaaaagttttccggcatgtaccatacacttaccagtatggagggccttcatgatgagaagctttggccgaaaaacttgagtcctatcgaaatcgaggagcggcgaagactagtatgcattcctttatcttatggttacggttcccgctaacttaatgctatgaagttctggtctatctacacgttggatatttattctaccatcgtatggggaggcgtgattcgatatcgcgaagcgcattctctggtaagatatccgagtgaggttgacgatgagcttatcacactacacggctacgggatgcctcccgtgtctccggactcgggcgatgtgaccgttgtatcacggcagcctgtagcatggcttcggggctggaactttacgacagacctatatcgaattctagaatacgtcgtcgacggcaatcggcgtcgtttctcgtcagccaacggaacctcacaggtgtggtctctgttcactccggcatccatgtcagaaccagcagtcatggagagggtactatccatgtacgccgcactaccgtcgcaatttaaagaaacaccacccactacaggcgacatggccaaggacctgttcgggttccaatctgccaacatccaggcaacactgcagctcctccggatggtgcttttgtcagcggaagagcttggcgtagaccgcaaatgtgacgtggccggggaacttctcagtgtcttcagcaacgttcccgtggagtatttgaaagccatcagctcccctttagtatgttcatcattgcttttccagcccccatttgactaaccgctcccagctccatcatcttggcggaatcggctatatcctcggttctgtaatggaaggaagtttatcagaagcatcctatcaacgcgtccgcacgttgttgtaagtttttttacacatcccaggccaattgcccaaattaataagctcttacagactcgaaatggctgacctcctcggtcgcctcgagacaggtctccagcgtgccgccggcgccagccaacgccttcgatcgcaagtagacagaatcgacggctacatgcgcacctcccggctagtcaatctcacattgcaacacccacaccctcaacataacgcaatcccgatcgataataaacgcgagatgcctttcccacccacaacgtacattcctcccagtggcccagtcccggcagtcggcccaccgacgggaataggtgggcagatgatgcagttccagctaccgccggagttgttgtcggattggccgtggccaatggatggggctcattcggatgggttccttccgctggcgtttgaataatttattcggttgttgctgggtgcatttgtgcgagttggaggccacatgtttgatgattgcatagaatagaaggagtgtaattaatcgtctgttttatatttatactagcggtaatcgagcagaactcacgaattgtggtgttcgttaccctttcgtcctatacttgctttaatcgtccattttgtctctttcatatgttcgttctcaggttcaattatcgatctaaggtgcttctgcgccctttgaggtattaactacacaggtccgactttcggacgattacatgactcttggcctcttaagacacatatagtagtactaagcaatcttttaacagataaacctcattatcaaaagtctatttagattgagtggagggcgtccattttgtggagaatgctaattgagaaagtttgatgtacacagtttctcttacataccacagcaatcttgactcgaagtatatacggagtacgtaattccattatgagaaatatataaaaaagtactgccgatcactggccttgacctgtaggaacaccagcatcatgtacaacatagtggtcaagcccccgctagctcaaaatgcgggggtatacttatggcttcggccctcccaaggtaagcgggaatatcataattcgtacttggccaaaggtcagtggaaccgacagagagtttgttgatcttggccatggcccgatcggacattttgaactctttcagcctagtctccagtagtccaccccacaaaggcgtgttgaggcattcatattaacttctcttatcaaaaagtcttagttggtcattgagctatggcctctggacaattcccatcgaataacctgataagcttatcacttggcagatcttcaaggtttagcatcgccttctcctcccccttttgggataaccccgaagacattcgctgatttgaagttgatatcttgatacatctcttatcagcggtgtctggagtcggcccacggtcttggcccacgttcttggcggtgttagagatgatcaacatcgatgccgtctatctatcaacgtcgttggtgccaatcctgaccccaaggtcagtgcgcatataaagagtcatgtcccgcgcctctggacttggagtacattccaggctcaagtagcattccgccatggagaagaaagtctttacaaatgtttccgccgaggatgctagcacaggcgctgttttaccctaccgggagacaaagcgcggtctatcatcccgacatgtgcaactaatggccattggaggctcaatcggtactgggctgttcgtcggtatcgggtcctacctgcgggatgccggcccgctgtcactgtttctggggtatcttgtttgggggtgcctcttcatcttgcctgtcaatctgtgtgttggggaaatggccgcataccttcccattcgtgggtcgatctttgagctcgctgcccggtttatcgacccggcatttggatttgctatgtaagtcttttcgcgcctgaaccttgctgggctctacgctacagacgctaacccttctaggggctgggtatatttctacggtggtgtaatgctcgtctgtacggagtattctgcagtctcaacaatcatgcaatactggaacacaagcgtcaaccctgccgtctgggtagccatggcaatggttgtttgcacgatgctcaatcttgtctcggtcaaatggtacggcgagagcgagttcatcctagcgtcgaccaagatccttctcctcatcggactcgtcctcctcaccttcatcacaatggttggcggaaaccccaggcacgatgtctatggcttccggaattggaccgatggcgtcatgttcgagtactataccgatggcaccacgggccgatttttaggcttcttctccgtcatggtctatgcagccttctccatcgctggtcctgatctcccagccctagccgcaggagagatccagaacccacgagtgaccatcccccgagtcgtgaagatgactttctatcgtatcgtgggattctatgtcatcggagtcctagctgtcaccatcatctgcagccccaacgacccacgtctcatttccgcaattagtgacggtgctgctggctccgctgcttcgccttgggtcatcggaatccaaaaccttggcatcaagggcctgcccgatctgatcaacttcttgattctgctatcgggctggtcatgtggcaatgcctacctttacagctccagccgaacactctattccctcgctcgcgatggccaagcaccgaagttccttttgaaatgtactgcatccggcatccccataaactgtgtcctcacggtctcggttttgtcttgcatcaccttcctcgtggccagtacctcttccgtcgaggtcttcttctggttcgttgatttgaccaccatcgccttcgttctcacctacacgggcatggtctgtgtcttcatcgcctggtaccgcgccctgaaagcacaaggaatcgaccgcaagacgttcgttccttgggctgcaccatggcagccatacggcgccattctcgctgtcattatcggctccacgaccgccatatgtaatggcttctctgtcttcaagcctttcagtgtgcaaggcttcatcacctcgtacttcggtctagcgttctgggtcgtcatgtttgtcttctggaaggtgtatcaccggagttcgtttgtgaaagttgcagaggcagatttgtactctggaaaggcggagatcgatgaagagtgcaagatctgggaagaaggtggatgggccgaacggcggaaggcggagctggctcagatgcattgggtccggcgaatttgggagaaaatgtggtgattcactgtatacttggtgcttttttgtacatataccatctatcttattcattgaattatgttttcatttgatgtttgctatttccagagcctataaagactaaatggtcaccgagatagaatagcagattatcacagtcggcgagcgtagatagttgtaggataaactccgatttcaacccttagagtcccaatgtctcttttccatgtctaaatagaggcatataagagatgaagtatgtttcaaggttgtacctctcataaactagacgctctgattggccagtgcaggtgatgcttaagggcacgcaccggtggggaccgggactggaaaagaaaagttgcccggttcacctgggcaagcttctccagacctgcgaacaacatcaattccattatgtccaccatgtcaactcgctccgcctggcgagctttgcactatagtgcaaagcgtcgcgctttccaaccctctactccgtaccgttgtttctcctgtgccaaccgtgtccaggagcagaagccagagaatgaccgcatgacacacttcggcttcacgaatgtgcccgaggcagagaaggagattcgaggtaagaatcataatcaccatcttacccaattgaccatctcaatgcaaccaaacccgaacccatacctgaccaacatccccctacagtcggcgccgtcttcagctccgtggcagcctcctacgaccgcatgaacgacctaatgtccctcggcatccaccgcctgtggaaagaccacttcgtgcgatccctgaacccaggctcatgcctgcccgccctgaccgccgaccagcgcggctggaacatcttggacatcgccggcgggaccggcgacatcgccttccgcatgctggaccacgccacgaacgtcaaccacgacatggagacccgcgtgacgatcagcgacatcaacgccgacatgctggccgagggccgcaagcgctccctcgacacgccctactacaacacgtcgcgactggacttcgtcgaggccaacgctgagcacatgccgcatatccccgacgcctcggtggatctctacactgttgttttcggaatccggaactttacggataaacaggctgcgctgaatgaggcgtatcgtgtcctcaagcccggtggtgtctttgcttgcatggagttcagtaaggtcgataacccgattctggatggcatttataagcgttggaactttggtgccatcccccttattggtcaggttgtggcgggtgatcgtgatagctatcagtatctcgtggagagtattgagcgcttccctagccaggaggagttcaggggtatgattcagaaggctgggtttatgattcctggtcagggctttgagaaccttacgggtggtattgctgctatccataagggtattaagccgattgttaaggcttgattgcggacgattgatgtgtgttctgtactatatagacccgggactttgcatactgattgtattactatgagaaatatcattggcgttgatttgcatggtgtatgaacagccttggctgtgaggctcaggcttcggttgtaaatgtgcatctaaaaatgtatgtataaacaaagtgggcgtaacatcgtcaaccgaatgcatgataatgcgaacgatatgtaaaaatcaggtgtgtatatccaagaaagaaaaagaaaagaggacgcttttcagtcatgtcatccatccaatagatcctctgcctccatcactcctaagaaactgtcgggagaggccatatccttcacgacagcaacgacagagactgggtctggtccattttgcgattcacaaatagtacgccgaatctcagccagaggtgtcgagtctggcaccaagagccatttgctttggggtacaacgaatgaagtaccggggttcttggctataacctcggacacacgcacatccatatctccaccaggagaaagaagagcccgaatgcgccgcggagggattatttcggacgaagataacaacacccacgatttagcgtttgggtgctggatggctgtgagaaggatatcgagaagtctgacatcgtcaggcgactgcgatgacgcagaagcagtggggatttgatcgagcgaaaccagcatatctcgacaaatgacgcgctgttccggtggcgcctgtaaattgaaaggagggatcgatggggtgatttcctcccacggaagcgacacagacgaggttggagagtcaaacatcctcgttgacatgccgctcgacggcgtggttagcggtgtctctgccgccgccgctccaatagcaccaccaggatggaacccccggaatacctctgcaggactcttccctgttgcactgtgcagcttccgggccgtagcaatagccagcgcatcgccgagcgccaaggccaccgtcgtggacgatgtgggcgcgcacacaccgaaagaagactcttcgtcctcgtggatcggggccggtaaaagaatacccattcccgcagggccatgcaacgagagaagcggacatgtcgccggatgtgtatgcgacgtaagagcaatcaccgggacaggagcggggagatgcgggagcagcgataaaagttccgccgagcgaccagagaaggatatgagaagaattgtatcattctggataaaccaggtcagtatgaaagtttccaatgtcttatcacaagccaagcgatcgcgattgtaatgcgattataattcaaaagcacatctgtaggcgcaggcgcaggtgggcttaccggccgaaccaatcccaggtcgccatgcaaggcttcagtcggatgcaggaacgcgctatatacgcccaaactattcatcgtcgcctcgattttgcgtccgaccttcccacttttcccaaccccgcaaaccaccagtttcccaccctcgcgcacgctccgcgcaatctgatccacagcgcgggcgagatcgtgctgcgcccgcgcatcggtctggtagatgtgctcgaggtgggcgagagctgctcgctcggttgagatcacatggattgctgtcaccaccgacgagacatcttttggcgctgaaggatcggaggaattaggaggggtgagaggccacgagggttcgtgggcgggttcgaatattgacatggcgggtgcttcttgatatctatagcataatggctagaagtaaaaggaatttatgagtgaagtggtctcttcgcacccctgggcgccggttaacttgcgggggccgatccaagatcagtcgataacggaaggtaacagtgggcgatcggagatcggtgttttctcgtgtgagaccggggattacatacatcttttgcgtggcgatttgacagattactatgctgcaacgtacccctttctaatcttgatttcgtgccaatgtccatagctccgtctaaacccgtctggcaaaatggtgtcattttatgctataatggtgaatgtggaggccatacttgcctattggagtatttccgaggccgaggcataagagaacctaaaatattagtttgaacggattttgagcaatggaggtctattcaatcctcgtatgtatagagggtataaccaaaaaaaggagagaaagcaagccccgaaaatagtatttacatgccgttggccgcggggataattgcaagactctcccgctgatagtagcttctagcaagcgcagagaccatatttagaactcggaaatactccccaaactccaacaaaaaaaaacatcatctgtcgcacacgagaagacagaaggcaggggtatcgcatcaggatgtcgcgtcgctaggggtcattatgagtatgcctcaataggcagtagtaaatcatcgtatcatccttgtcgaccctcctgtttgtctttacccttctctgccgtgccatcatcctcatatagatgatgctgctcaatgtaatgaatgactggaactgggatgagataacgcacactcatctcacgtcgcaagaagagtcgaatctttgtgctgctaacatcattctgaatgagctgctggatgacatggatattgtctttccagggctgcaagctggccagggcttcatcgatatcggtgccactgcgctccacaatgaaagactgaaaggtgtattagcgacccatttctcgagcgcaggatgaaccgttctggatgttggaataaacttacgccatattttcctaaaatatgatccagatccttctcactccacacaccaggtgtggacatggtatggatcagatccgcaccggctaacagagcaatgcgaacgggcttccgggttccgtttccggcgtccacacccttacggacctcattgatttcatgatcaaaatggtccagcaccacagctgttggctgataggccttctgaatcggttcccatgtgtccaccatcaaccagtcggaggtttgatcgactgcaagttggcacatcgcaaccctatagatgaatctccgttagctccgaatagattgaataggatggaggtagaatcgcctaccgatcctccgcactggccaagccggctttacgataggcatccgacaccggcgataggtatcccccaatgatttcaaagtccgtgctgaatctgacgtgatcggcagccatttcgaacattctgaggtgtaaataggtaattggggagaaggaaccacaagcaaccagcaggagaggggtcttttctgggtctttcatcgtccgcctgaggcgatactctgggaaggtgtagtggtccatggaggcgggggtagtgtcggcgggtatctggtggacatcatcgctctgcccgccgaccatatcggctgccatggagagatagtgaatagaggaatatactagaagatcttgaattccggggaaggcaaaacggtatcggagaaaggcgggggagatgagaagtgaggatgagtttctgtgaattgcgaatggggggcgaaccgaaggcggcaagagaatgcgccggagaaggcgaacggaggtgaaaggtgaaagacgaaagatggaagaagtgaaatgtcgttcttttttcctcgtttcttcgcccttttctttttgaatatcacgttctagccctagagtttccccgtgattaataagatggctcggtgagtcaatccagttctactcggtgcgtctccgcgatccggatcgatcgccgttatattccactttgggggttcataataataatgaagagcgaggtataaattcagtttgataaggttatttgagctctcaaggtccttcattcttacctataacataggtacggagtggttcggttttatcgagcactatatatacatcaaggtactccgatggagtgagtatattaataaacgtctttgtctgtattcaaataactggatcatactaaatacaatagatgtaccatataaaaaaagatatacaatggacccttgagatattattccttgtgatattccttgccatttgtactgtcaggtctcagaccccctctatgcccgatatccaggcaagatgcaaataaggaaaccaagagagccatttagaagtaatcgtgcaataaagtattataataagtagcacgtataataggtaatgtatacagtatgtccaagtaactatacaaggacctggttagatcatcgaaatgttgcacttccgccgcctgacgctcgccgaatcccatcaaccaccacgtcaaaccctccttttctttttcccctttctttttaacccccccaccatctgaaaaattatcttctgtgtgaccggaattggtaaatcgttcttttcttgagatctcctagccccaacggcaacagtaacagctacccgaaacatcgttctcgccagccctctcggctagccttcgataggtggatggcgggttaacaacggtgacgactactcaatcgagattcctatacccgataacttatggccaggcaaaggccttccgccaaccgccaggaccctctcgaggattatcccgtctcccccgcaggcacttcggcctcttcttccctgaggtagtttcccattttcttcgccttcacaagtacactggttgaggttcagactcatattccgtggaccctcactgggaatctgttgatccctgagtgctcgtaccccccaatctgtcccctggattgttaagtggatgctccgcagtttcatcgggatccatcacttctgcatttctagattcgtcatctgtctacccaactatctgcctatcgctttgacccatcccggacttctttttctgtctttttctttcttcagaccctaatatcatcacgcataatctaaaacaaaagaccactttctcatgtcatccagaataactcgctcctccgcgagactcgccacagaccctccacctgctgagtccggtacaccgcttcaaacacctggctctacctcatcccggaaacgcaaggcatcctcccgccacgaccgacaagcagacgccccgatacagccagcaccggcatcgccccaaaggaaaaccaagcgaccgcggactgcagcatctcaaacagctccatctactggtcctgttcctgctgcaccccgtcgaggagcccgcagccgtacagccatgtcacaaccggggtaggtgatgatgcacattgatggataagaactagggctaacctcatctcagaccttcatctcgaccgtcggaggaatcatcgaaatcgacgacctccccacaaccatcgaggcgaaagtcaagtcggaacggtgagttttatggatgacaatcggccgtgtcacacaaatttgtatctgatgtgctagttactgatcccttctctttatttatagaccgacccgcgacgacacagtccccgccgccccgacgcccgaaaaagcgttcgggcaagtcaaatcccgatgttttgatgagagatgcagaggaggaaatcgaggaggaagagcatcaggaagaacaacaaggatctcaaacgggagagagcaacgatggcaccaatccctcggcgttcggtgatgatgatatggatccgttccacagcagcctattcggtggcagaggccccatgggactccagagcactttacgtgccctcactggcatgatgagtggcatgtcatcacgtcttcgagatattctcaccaacttgagagcgaaggatgatccatctctccaattgatcgccttgcaagagctgtcagatctcttgcttgtatcgaacgaggataacctgtctggtcaattttcgccggacccgtatgtgaaggagctcgtgactttgatgcagccaaatcagtttggcgaagaaaatcccgagattatgcttcttgcatgtcgctctcttgcgaatctaatggaggccctacggggctccgtagctaatgttgtatatggtggtgctgtacccatcctctgccaaaagctgctcgatatacagttcatcgatctagctgagcaggctttgagtacattggccaagatttcagtcgacttcccagcctcaatcgtgcgagaaggtggattgaccgcatgcctcacgtatctggatttcttcccaaccagtactcaacgaacagcagttagtacggccgctaactgctgtcgtaacctccctcatgactcgttccctgtggtgcgggatgtaatgcccaccctactcaacgtcctctctagcaatgatcctaaggtcgtggagcaagggtgcctatgcgtatcacggattgtcgagagcttcaagcaccgaccggagaacctggaggagctgattgagcctgcaatgctcaaagctatccttcggcttctactgccaggaacaacaaacctgatcgggcctcatatccacacgcaattccttagggtattggcaatcgtatcgagaacaagcccacgattgtcaaatgagcttctcaagatggatgtagtggatacgctttaccaaattttgaccggcgtgtcaccaccgcaggatgtggataacacggccgttaagatggacagcgtgctagtcatgcaagcattgattcatcggccccgtgaacaagtatatgaaactctcaatgtcgtctgcgagctattgccaggcgttccaagccgcgatgcctcaaaaaccgacaacctcctaagctcatactttgatagccacatgtccattggactgagatctcccaaatctaaagagacagtggaggaaaggcggtccttgctcgttaattgcaagactgagcttaagcgttttgcgatgattctgttcccaactttgaccgatgcctactcgagcacggtcaatctgcatgtccgccagaaggtcctgattgcacagctgaagatgctgcatatccttgagccttctttgatcgaagacgccctgcgcacagtcccttacgcttcgtttttggctgccattctgtcccaaaaagaccacccttctctcgtatctttagctctacgctgcgctgagctactgttccagcggcttgaacatgtttatcagcatcaattccaccgtgaaggagtgatctcggcgatcatcaaactatccgaaggctctttgtcaggagaccaggagaacatcgattcatccgatccctcacgtataaacacgagcacagattcatcgcgtggtgctaatcaaattgttggagagactggatctggcggagatgatgaggatgaagacgatgaacccgatgactttgacgacgatgatggcgaggatgatgaccaagatgacatgtctgattccgaagacgacttcatggccggcccacgcagtcgacaaaagatggacaatgcgctcaacgacgtagttatccaagatgcccaagctttcctcgaggtatatgaagcaagccacggtgaaaccgttcgagcggaggctttgaggatcttgacagcactgaaatccctcgcctccgaaataaaatcacgctattcccgtggcggtgagggtggtcttcccttatttaaacagctcgcgtcctactttgacggagacgccttggagggcattaccagctcagaattgctcaactccggcattatagacgttcttctgtgtgtccttggtaactttcaatcgccctctatccgcgatgctagagccgacttcctgcgggcgtttatgggtgtttcaatctcggacaaggcccaaagccagagcaccgccacgacacctttcagcgtacttatccgcaagttgcaagacctgcttagtaggacggaacatttcgaagtccttaccattagtcacaattcgctagagaatacccgcagcaacgccgcctacatgctgagcaaacagctccgactcaagctggttgccgacgaagggtccgaagttcctcgtccttatcgcaacatcatggtgtcaatccatgccattgctacatttaaggccttggatgatttccttcatccccgaatcgccgtggcggaaaaacctcgcccctcacgaacaagggactcaattctctcacaaattgccaatgcatcccgacttcgtgaacagctggcttctgggtctgggatgagcctcccaaatcccacagggggtctccagggcactatgaccgatcccacggatggtgtctatgattcttccaccgatcacccgcatcatcatcagtccaatcggattcaagaagaggaagatgaagaggatgaggagccccttgaatgcgccgatgaaaggcaactgaccgacgaagaagaaggcggcgaagaagatgagggcgaccaactcaatgccattgttgatgatctcgatgaggatatggaaaatgatgatatctctgacccctcggcagtcaacatggaggtggcatcctcgggcaaggtcacggctcgcaaggaagatggtacccgaattgggacaccctcccagaccgctgcatccaagccttcatcgtcagctcctgccgctctccccagtcacacgcgcaacagttctctcgccactgccgggcgcccgttctcatcgtatgccgctgcaatggcctcggtgccccaggactggcaccttgagtttttcgtagatggcaagcccgttactaatgagacaactatctaccgtggtgttcatcacgaccgtgaggacttggacgagagtagtgccaagaacgtctggtcggcagtccacactatcacatttaagcgcgttcctggtcctccgccgccagagccctcaacccttacaccgaccgtccaggcttcttctgagggtgatgcccttgagatcccggcctctctcgacaaagacccaacaacttcatctatcattcgcctgcttcgtgttttgcacgaaatgaacgcaacgattgatgatatcttgaccgataccaaagactccgccaccatcacctcggagcccttggctcaattcattaacacgaagctcaccgccaagatcaaccgccaactcgaggagccgttgattgtggcaagcgattgccttccaagttggagcgaagacttagcaaggcttttttccttcttgttcccattcgagacaaggcatctattcctgcagtcaactgcatttggctactcacgggcgatgatgagatggcaaaattctcaaagtggtgaagacagccgacgggacttgcgccgcgatgatcgcccattccttggccggctgcagcgacaaaaagtgcgcatctctcgttctcgcatccttgattctgcattaaaggtcatggaactctatggatcttcccccagcattctcgaggttgaatatttcgaggaagttggtactggattaggaccgacccttgaattctactctactgtttctagggagttctcaaagaagaagcttaagatctggagagacacggacggaagctctaccacagaatatgcatttggcaagtctggtctgttcccagcgccgatgagtgacgaacaagcatcccaagatatcgggaagaggcaattaaacatcttcaaggtcctagggaagtttgtggctcgctcgatgcttgactccaggatcatcgacatttcgttcaatccagcattcttccgtatcgcggatactctgtcatcagtggcaccatccctaggcaccgtcaagctggttgaccacgacctggcgaagtccttggtcatgctcaaagaatttgtcaatgccaaaaacgtcattgaggcaaaccagtcgctttcgccagcccttaaatccgaggccgtgcaaaacatcacggtccacggtgctagtgttgacgatctgggcttggacttcactctacctggatatcctgcgattgagttgatctctgatggcgccaatgtgccgttgacaatcgaaaatattgacacttacatcgaacgggtcatcgacatgaccttgggtagcggtgtccggcgtcaggtggatgccttccgggctgggttctcacaagtcttccccttctcctccctttgtgctttcactccaagtgagctcgttatgcttttcggacaagcggacgaggattggtctatcgagaccttaatggactccatcaaagccgatcacgggttcaacatggacagtcggagtgtgcgcaacctgctgcaaactatgagcgaactggacaaccagcaacgccgagatttccttcagtttgtcactggtagccccaagctccccattggaggtatgtttatttcatttttctccacataaaatcccactaacacaaactcaaatataggtttcaagagtctcacgccgatcttcactgtcgtgtgccgcccaagcgaacatccatatacaccagacgactacctccccagtgtgatgacatgcgtcaactacctgaagttgccggactatagcgacctggacgtactcaagaagcgcctctcagttgccatcaaagaaggccaaggagctttccatctttcttagacctgtggacagctgttcccactcaaaacttccaccatctcctcttctctctcttctctttgctggcttccgctttttttgaccagaaattattcacgatgcgacgacgtgcgacttgtttctacttcgttcctctccaattcccaagttttcggacgggctgtttcgctgttcttgtcctttccttcttcatatgccatctgggtcgaaaggcgtcatggcgggggctccttacgatagtgatattagatagcaatgatcactttctaccaaaagtctagtttttccggtgtagatagtcttatattgaggtaacatttggtacaaatgtactgtagtacaaagactagtccaatgaaacatggtgaggacgtagggatcaattgccccattaaatataatggctatctcacattcctccgagatcaccgatggatcacccgtggatatattcatcagactgccgtgttgaatgaaataaaaccatccctatgccatggctgcccctcgggagattaccatcgaatgtctcaacggccgttgggttctggtaatgatactattccccttgaagatgctatattctaatcgattactgtatacagaataaggacctgaccagcgaggcagaccctattctaaaattggttcgaaataatctgtttctacaactttaaatcctaagctgatcacgtaccgtccacagcaaaaagtaccttggttgctccgcaaggcattcgaattcgcaacaatatacatccaaatctcccaataccaaacaccagcatccgaaacaagccaaccatctacgagtatcgactttacccagacagccacagcagggctggccgcaaccaaagaagaacgcgtcttggattggaaagtattagaccacgaggactacttcttcggcgaggtcaaagcacagagtgaattcgtccacggtgttattgacgcaggtggaatcataaggcctgaatttgagcttcagacggccatgtctaatgaccagattaagcaatacttacgaggtgagatccaggaggatgggagtaaatctaccggttttctagttgaggactggagtgggatgtctgaggaggggcctggtctttgggtacatacctttgagcggaatgttaagtctggctggacagctgagcaggtcagtatttatagttattgttggatgatttaaatgaaactagaggctaactgacttgggctgcagatttggggatttgagatgtttggggactcgcgatacttctctcgtcgaggggtgatcatgacgacgaggggagaatatatgtgtgggagaattgtgtttgatttcgtgagtacttaatgagcagtcttcgagaatcaagggggaaattaggaatcaatcattctacttatctatctatcactgactttatgaatctaaaactctataactatgtataacgcagggacatgatatcaactttccacacaaagacactctagctcgaataaaccgacaccatagactgtgaaaactgttagctaaatctaccacatacgggtagaataaaggggaactcacgtctgcaaacttgggctcaataaacaaagccttagcctcagcaaccattaccgcgccttcactgtcctcatgcagcagactagcatcaggaacaatggtatgcccgtccgcagacaggggcacggtcaaaggaagataagtcatgcggccctcaacccaggccttcctgccctcgaccttaaccgtctttgtgcgcatcacatacattcggtcgggaagagctggctttcggaaatccacattaagattcgccgtcatgcccagcccgctggggaaagccgcagagacacagcgcgcaaacacctcatcaaaaagaacagtgagaagaccaccatggacaaagccagggtgaccacagacgtcctggccgatatggaatactgatacaacgctgctggctcggtcggcactgtcggtccctgtcccagacttgccggtcgagagccacatatatggtgcgaatgcaagcttgcctacaccagtcaagctgccgcccacgaagtgatgctgtctaaggtgtggcgggattgcaagatggggacgtgtttccttgtaggtgctctgggttccgcgcaatttctggacgagagggacatgggaaacaagtttgtcgaggcctgtccgttcgttgtgcaatgactgggtctgagacagtaatggggatccgtcggtttggctagggagtgcttggtcatgaacgaccgccgaccggtttgggtgttgttcatggagacgggcaataggcgccgcaggcgagtatgttctgaatgctgaaaggggttgcgaccggaacagccgacgcgctgtttgtgaaatgtgcgacattctgggaagtatgtatgaagttgatgttgactgtagtgatgcatgttagaaggggatttcgagggacttgttagaatgccgaaccgaggcacggcacggagtacgtacatactgcagagcaggctcgggttattcggctcgtgagtttgtcgatattcctagtgttgatatgtagtttggatcaaggctaggtgatatatgaagtataccacacttggacttttgcagtgacgatgatggcaagaagaatgtttcgtaatcttaagaatagacccgccactctctggattagtcccgtttctgtttccagggtttttcttatctttttttaaggccgattttcccctgctggaaccaacagtggggctcaaagccttggaacagccgatgatcggaccgtaatgccaagagatttagttcggtatgccgagaactataagaagccgtagatccatgtcagtatattattcaacgtaattcaacggagaccgaagactgaagatcaaagggtgtagtattgttatattagcatagtatggtggttttcaatgggggtccttcctcgttggggggtcaacatgcagcacagaaaaactgttgtctcatggcagcaatcattctcgtcatctccccttctctttttcaatcaaagatcatcgtcatccagcttggatgcagcctcttctcttgtattagccttcatctcaatattgactctcaatcttatcatctcaagatctcaagatggtagacgaaactaacctctcttcttctgacgaggattctggccccgagactgtcagcaacccgttcggctctggcgtgggtagtatcccccagaccatcaataatcctttcgtttctggtgtgggtaataccccccagactgtcaacaaccctttcggctctggcggggacaatccctcccagataaataatcctcttgcttctgcagtgggcaacatcccccagggcaacaactcttctgtttctggggtgagcaatggcccccagatcaacagacctttccgtactcgctggggtccccctctgatccgccccatcgccatcgaagacggccccgtttcccccaatggaggattgaccaatggtcactcccacgtaaatgaatggcgcgctccccacccaacggacttcaatccgttgtacgccccgcccgacgacgagaccgacgatgaggcagaagccaaccctccacccccaaaccacgaggtggtggatgaattcctcgatgaggacgaggacctcgacgatgcctcagatgaggatgaaggggtctctgccccgtatggcaacagccagggcctggaggccagcctggatgccatcatggcggagggaaatgaggaggatgaggctgacgaggacgcctacctggacgaggtgtaggcaagtaaatgcttacttgaatgcaaggtatacatcacatttccttttctcctaagccccaatcagcttcacttcagtcttactatcacttcaaactcatattcgtttcaactcacattcgcttcattgctaactcatttccttgtcatctaggtgctggtgagggaagcggcgacttcctcatcggcttcctcagccttgcggtcccaccacggctgacctcaagcgtggtgggacacgaatacaatgatgaagtggtagggaggaattgggggggaggaggagattcttgtttgagttggcccgcggaggctgacgatgtacgatttggacggcgacatggggcgtttgctgtgtcactccggtctgcaggatgacactgcactaggttcgctcggcgtagctgtcatgcgggccaggggctactcattgagtagtcccgctgtattgagtatccttccttttgtgttgagcgtgtttgtttttgagctgcgatgatcacttgatcaatatcattttcatttcaactgccccttgcgacactcttattgcaccggagaggcacatcaagactggaatgggctgacaacagcgctgctgtggttcggaagcagggagagcagagtcgagccctcgtgggcccattccgaatgttatgcgcccacaatacgacaatacaatacgataccatacgatgcgatgcgagaacgaattcacgtcgcctttgagttgacattttggagcctgcatgcattgtcctaaactgacttataaagcgcagcaatcaaccaaaggctggctggtattcgcgaatgtaaagcggctgtggcggctgtggcggctccggctctcatgaactcactgcaagcagataaagatagttacttctactctgccggaagtaaatgattaacatctcgcatctctaggagcatagaagaactaatacaaagcggactttgatgctgacctacagtatagaccgaaaagttggatccctagtttaccgactccacaatctgtattccgggaaggccgaatacatggaatatagtccaataaagctattggtgcatttgatactgaccaaacagcttctagaacaaggtaccgtcgccaaagttcaagatgggactacactttgtctccggacgcttagccgctgcaagctcacgacccgctttccaagagcccgcctccaacacctgaggtagagacaattggacaccatccaagcgagcaagaatcttcgtatgcagcacatcgaggagagcaacagtcattgctcgccattccacaatctcatcatcgcccgcaccgaacgaaggcaaactaccacccgaaaggctcaaccctcgctgcagtgcctcgggcttcaattctagcactcccatgtcgacgagcattcctccattgcggtactccggcagaccagttcccagctcagtattggaccatgagactgagagcaggcgagagaacggtaccatcaacgagtaccctagccattgagtcagcttatggaatggttggatgttggagtaggggttcgactccgatccagcctgctgtgcaagtgctcgcaggggccatgcatcgccaatgggctgcccattaacgtgagtacgatcagacggccagatgggaatcaggaggcgctgtagcacgttccaaagatcccggtaatcgagctttccgctctcattggactttgcaatgaggtaatctagattttttgggaactgtttagtgattttcttgatcttatcggtggtatgaacttaccaacaagattgccaggacggccagagggtccaaaaatatctttcaagttcatcaaagactcgccgagtttacggagaatatctgcacgcgcagatactccgatcatgggattggcatcgtcgacctggagtccacgggataagatgtctacattgatatttcgcaatgcatcgcctagcacgagtcagccaatatcgcattgaatataagagcaaacgcttaccattgacggtgtgtttcaccgatgagttctggcccgcaaagtcgccgttgaggaacatgtgcagggccgccaccgcaataccttcgcttcgattcagcgtcagaccactttgtgcctccttgaatttccaaaagtctccagcaccggcatccaaaaggacagagacgaagaaaagatctatcagcctgcgtgtcttttccgtggtgtcacatttctcctcatcccattcagctagaagagtggctatgcggggaaccccgccaacttcgaaatgctgccagcgtccatgaggcggaatcaggtgatatctgtcagggccgaagtcgcgctatgatagagagtgagcttttttatgcttggaattggaagtgtgcgtcctgggtatgtgccagacctacctgaatcagtttaagtacgtagtcggtggcatcttccatgcgttcggggtggtaattgaaatgattcaaccgatcctcttcggctagtttgaggacaatatgggctcttgtacggacggcttctaggcctaatagttcttcaatttggggatccatgttgggagaatggaagaggtgactctgcaggttaagaaacgtgttttatttactccaagccaaagcgggggaacttatgcacttatctatacgtatcgcatttatcttggcgtgtggggctttcctatttgatctgccgccgcttttacgaatactcaggctcagggtcactgagtagatgtcagcacggagatcagtgatcatgctcagtcacgtgtagaatgactgatgctcagtgaatgctcgaggttgcattggatgctgtcagtgatgctcagtgtccaatcagtgaggtaacactattcccagaagggattagcccctatagggtcgtttagtactgatcacctcctacatggtcaatattcgaataagcaagtgtagggggttacttcatgaccattcgctttcgaggctactacatatgttgtacttgatttccaccgttgtttacttcaaaccccactgcgggatcggcgatcgtgcacgggcaccaccgaggtagaaacaccgtcggagagtcggagagaagtcggagtcccactggtcctcgtatcacttggccatgtctctcgagctgtatcacactgcatataacgccggccagaccactgctgtactaacccatggcgccttggtatctggtctctactgggatctggtgatccccacctcacgtcttactagctcctggtcccagatcttccgggccatggcaagtccgccggtacgccattctcagtggatctcgcagcgcgacagattgtccagctgatctatacatacgcgaatggttcagcgcacattatcggctacagtttggtacttaggttgctatccgcctggcctataccgaaccagatgtggtgaactctgtctttatctcggggtttagaacgttctcttaaacgtcacttacgccgtatattctatatatagcgtgggcgatgatacgtatagagaactacctcggccggtctcttatcagctaggcaatagatggtaccgatatcccacgtattgatactaatgtctgtacccttgacctgtgttgccagattgtattaccagagcatcctacacagtagttatcaccatggcctgcgcgtactctgattgttgtagcgggggttagtgcctacaaaggatagccccggtgatgctgtgaagttggtggcgatcgggagagccgaatgaagagactatcgcgtatacgcacttgaaaatgcgacatccgtggaatcgtctggaaccgcggctctttgcagagactgccacggcgtggtttaaacataaggagcttcccgagggctttgttaagctttagcgtcgggtagacggggtttgaagatacataggagtttatcccagggcttggatccataaactccatatcaggaactgtaataatgacagatccaacagatccaagataaaatagaactgtggatggcaattgtcgggggtgctcagttttacccagtgatcaaaaagcggcaagaggtgagcactaatacggaagggaaaggtcttaaagtgccaggcattatccgcatgcccagcaaactagttatctttaggcaaagtgtcttgaatgccatcgactatcctcggccattgggggatccctttgtcaccgataggttatctgacacatatcggacttccccgataacgttgggctgtgcactttggaagcatttaggagtcaagtatatatcagtaattttggtatagactaataatcaacattgtcatttttacaaccccattgcttcagtaatttccgaattagaatgtcagagggtcaaggtggcccaggaacgcatcgttgccctcaccacggagaagagcatcgatgtcaatgcgaccggccgtaagatacttctcgctaacaccgatgttcactcgctgggaaagttgttgtttaagctccgcacgaagcccggccatttcggtcttgctcacttcgctagcctccttgtcacgtctttcgcggccaccaccacgaccacggcctctgcccttagacggatcgaattcgtcactgtcatactcaacgccgagatcatcggccgcagcgcggagccagttgtcctcggtgttgaccttctctttagcaattgtggagtctgtaattcgcttggcgagagccatgcgggggcggaggcgggcaaccactcggcgatcaatgtcgagagactcgagagcgatcttcttgctaggtccgtcggggtcgccggccttcctcgctttcttagtatggaccttgccggcgagacgggcaacaccgacaacctcctcgggagcacagatgaggatactcttcccggactcaccggcacgagcagtacgaccggatcggtgaacgtaggcgtctgctgtgcggggaacgtggtagtggatgacgcaattgatgcccttgatatccaaaccacgggcagcgacgtcggtggcgacaagaattgagcttgggttggcagtaggagatgagaaacgttcgatggaacggagtcgggctttctgggccatatttgagtgaagtgcgaacacaggaagttgaagagcctgcaaaagctgagtgatgcggcggacagcggagatggagtttgtaaacacaattgtgcggttcttgggatagtagagaagaacggagtagagatagagatcctgatcatttgaattagtatcaggatacgagtggtctaaaaagaaagtggcttaccttttccatagcagggcattcgacaattccttccttgagtccaatggccatctgtgactccgggttcacatcgacgaacttaggcttctcttcgcggaaattcagcttcttgagaaggtactccatggacgctttgttgtccaacatatcactacttgcccagcggcttttgcctgctagcttttgttgaagatccttgtggaatgtggccgagaagacaagagtctgcctttgggatggctcctcgtcctcttcttcctggtccatgtctgcaatatctccggcttgatgtttgtctagtgcattaaggatatcttccatctccttgaaatgaccttcactcagcagtctgtccgcctcgtcaacgactaggaactggattttctgcattttgcggatcaatcccgttcctgtacttaggatctcccacactcggccgggagttccaatgacaatatctgcagtggcaagttgtctctgttgcttctgaatagacataccaccggtgataagagcgatccgcgcattagtgtcgggggaattggcaatgagctctccgatatgctttccaagctgatgcgccagctctcgagtgggagatagaatcaatgcaatcggggatttgttcttttcagactgttcggactgttcctcttgttttcctctcttgtccaaataatgttcgataatcggaataccgaatgccaatgttttaccggaacctgtagaggcctttccaacaacatcgtgcccatcgagaatgagaggaatactggctttttgaatggctgacggggagctgaacttcattttcgaaagagctgtaaatgtctctggcgaaagattaaggccatcccaagccgacacgtcgacaccttcgtcctcttcgacatcatccagagcagtgaatgagagcccggccttgatgttccggttctgaccaggtttggactctttagacttttgctccttaggcttttgttctttggactccttcatggctttgttttgctccttcttcttgtccttcttcgacttcttatcttccttcacttgagttgtagtgggagccttctcgatggtaggtgactttttggacgagtcctcatcgctaaaaccaccccattcgtctccgtcatcttcggacgggggtttgataatcgattttgttggcttgccagacttggcctaccacccaaccacagatattagcatttagttcaacatgatcaagcaaaacatgcaatttcataccttgaaatgaacacctccgtcgctctgttttatgatatccacaccctcaatctcttctagtccaaagaaaccttctgcatcatccattcgatctggcatagcaacttctttccagttgaggtcctcaacaccgagagagccatgatcgtcgctcgaagccttgtcagacttgactgccttcttgcgtttgtttgcctcagacacctgggctttggggtcgcgtgctcgcttttgacccattatgaactgagtaattcttgagtattacagtgtgttccggtagacaagtgatctaattacgccgtcggggagaattcgcaaagaaaaaaagcggcagaaattttagtccgcctttagaatcttatcttttcagtccccacgttcgccgcaaaattaacccactttgacagacaattgcgactaagcagacattttttaatatgggtaaatcatccaaggataagcgcgatgcttattatcgtctcgccaaggagcaaaattggcgcgcccgttctgcgttcaaacttatccagattgacgagcgattcgacctattcgagcacgagaacccggacaatgtgacgagagtagtggatttgtgcgctgcacctggaagttggagccaagtactcagccgtgttttgataaagggcgaaagcttcgggcggcgggcatggctcgagaaaaagcggaaagaacaacagggattggagggcgcagagacaacgacgggcgatgacgatgacgataaaatggaatgcgatgagccttcttcgagctctgaattaaagccccgaaaaaatgtcaagatcgtatccatcgatctccaaccaatggcaccgctcgaaggtatcacaacgctcaaagctgatatcacgcacccctctacgatccctcttctcttgcgcgctcttgacccagaagcatacgaacaaccatccacatcctccgattccccacaatctgtcacagaggctatcagacaacctcaccccgttgacctggtcatctccgacggcgccccggatgtaacaggtctacacgacctggacatttatattcaatcacaactcctctacgcagcactcaaccttgctatgggggttctccgaccaggcggcaagttcgtcgccaagatcttccgtggccgcgatgtagaccttctctacgcgcaactgcggaccgtctttgagcgcgtcagcgtcgcgaagccgcgcagtagtcgcgctagtagcttggaggcattcgtggtctgcgaaggcttcattccacccgttactgacagcggggtggtcggtatggccgcactgaaaaatccactcttcggcggagccgcagctccagtagccgtgtcagaagacggcaatgtgggcgtggaagttcgcgatgaaatcgaccaggacacacaaccccggaatactgcggcgcaacccgcgggaattagcactcctgcgcccaaccactctattgaagtccgtcaccttcaaatcacaaaaccacaagaccaggcccaaccccagaaactgtccaacaagttcgcggttgagaatcggtggattccgtcgttcattgcttgtggtgatctttccgcttgggattctgatgcatcatacaccctacctccggactatgttaatctggatcctgttcagccacccactgcaccaccatatcgtcgagcattggaattgaggaaagaaaagggtggtgcgtatggcaagaccaagtatggacccattcgtcatgtttgattgttacgttaaatgagttgcaagcaaaagttgtatgtatagacgacatagacacgacatagcattttcgaaggtcatgctaggaaggctgtcttcgaagcagatacccaaatacattccattgaattatatatacttttaatcaattgaggagagattgattcaagatgttgatattctaaatgcatttttgaagtcttccaaggctggtgcgctagcccaaatcaggatctacatacaatgaggggggaataaaagcaaagatatgccaatcgtgcaaccatgccatgcgaaaaagaaaacaacagagtctaatagacctccaggacatagcgctcgtcgtccttcagcttctcaatctccttgcgagtctcaaccttcttaccgttcctcctggcttcggtggcaatagcctcctccagaacagcggtgacatcgggcacgggccaagtgggaccacacaggtagaaagcaccctcctcacgaatgtaggcctggatgatctcgggtagggtctggcgcatacggtcctggatataaattttctcaggttgatcacgagagaaagcagcgccgagcagagtgatgacaccagcctcctggtaagcctcccactcctcgccgtagcagtactcctcccgctggtgacgagagcccatgtacagcaagacagcgccaatctccttgccctgagccttctcaagggcacggtgctggacgaaggcacggaacggtgcgagaccggtaccaagaccggccatgataataggctgggtggatttgggaggcagcttcatgacgctggacttgacactgacggtgatctgggagccgacttcgaggcggctcaggtagcgggtggccagaccgaagcggtcgcggccgttggggtcgacccagttcacggcgacaatcatcagggccaccgaggtcggggtcactttctggcacgaggcgatcgagtactcacggcgcttgaggggaccgatgatgcggacgatctcgtggaagtcggggtgggcggaggggtactcaagcaggatgtcggcgaaggtgatggtgtcaacttccgcgcgacgcttgaactcagtggcaccgtcaggaccacacagggtgagcaagtcggtcttttccttctcgtcagaagcaaattcagcaagggcctcgtaaaagcgcttgggtgggcgaccaaagatgtcgacgttctggaccagagcctggtagactgtgcggttctccagaacggcagggtcctcacggctgggaacctcgacaatcgcgtccgggtccaagccgtagaacgcaatgaaattcttaacgtcctctggatcgttctcggcatgaataccgagggcctcgccaatatcgtacttcagaccagtctcaccgagatcgaactcgatgtggaagatattacgatcataggtagtaggggtgagacggcggttctccttgacgcggacagtgaaagtcttgtgagcaagatcggggcggagggcatccctcgtgccataagcctccttgaacgcaaggccgcgtaccgcggtctgccagtccttgagaagagtggggggctcagactcgtccttgtcgaaggaaacaaagctgttggcgatgatgtctttggggagctgaacggcatcgcttacgccatcaggctccttccaagactcgggaacctcgatctggcggagcagcttctcgagatctttgattacatcgaacagggcctcggcatgaccggtgatcgggaacagcttctttattgccagtgcttcctgggtagggaaagcgacgcgaatgaacgaagcctggagaacaaaagcgtccagagacgagtcctcgatagcagatgggtcgacgacgaagacggagatgccacgctgggcgacggcttgcttgaagatagcaggaagctttttctccaaatcctcatccttgatgcccggggcattcacaatcaccttggcgttatccttgacagaagccagaacatcaacatcgttgagcagcgagatgttgccaacgtaagtgacgtcggcactagttaccgcgtaaggtgcatcaacaatcttagcactcttgcggatgtcaacgcggatggcaccaccctggacgagattgtcgtgagtcttgctgagggtgacgttgctggccgagtcgacgccaagagcctggctcaaagtctgagcggctgtctcggtaacggaggtgtcaacatcccagaaagtgtattcctgcacagacgcagggtccaacaactgcagcgaagcgttggtttcaccgctgacggtgagaataggctgatcatacacgcgctggaatacagcggcggtggaaataagatcccagcgctgggagcgggggtacttgatctcaacacaagtcgggttgtgatcacggccagtggcgaaagtcaaagaagcaagcacatcttcatagagagcggagtggatgccctcttcctgaacagcttgctcagaggcgacctggccgagaactgcgacagtcttggtggactggggaagaacgcgcaggaactcctcctcgatgaagggacggtagacccggacattcacaacaccgacacggacaccatccttcgcgagagagcgtgcgatttgggcggtcagagtagcctcaacagtgccaaaggcgatcagtacagaggtgggctcggagtgaccgtggtactcaaaggcactgtagtcggttccgagttcaccgttcagggtcttcagcagatccaaaaccttgccttgggcgtcgaggtgacggttgcgggactcatcgagtgtcttgcggacggtctcataggtgtgagtcagtccatccttgtcgaggacatcaatgactcgagtggtatcacggccaacacgaacgccatcatagatgtggatcgaggggaggactgaggcgagcaacgtcgtaaagagagccatgtgctgcgactcatgagcagaaccgctagagactagacccagaccgagatcctcagccagggagagagcagaggcatagtcagagactaggccatcctcgccggcgtagtctacggcggcgacatgtgcagcgactgggctagcgacggaatagagcaaagagagttgctccaatgcggagcgcatgtaagggagggttgctgaagaagcaacgataccctgggggatgtggcgcttcttcagatcaaagtcctgagagaaaaggtagccaagagccatgttgccggcaccctggcgggtttccagagtcttgactgagggagactcgccattggcattagtctcgcccttcaaagtccattccttgagagcagcatcaagatcgaaagtttccggcgagtaggagaagatcttgtcactcagcaagtatgcgacttgctgaatgagtgtctgggctgtaacatatgtcgggccactcaaggccgacagacctggaactgatgaacccatgacttcttcttaacaccggatataggaccgatatttgttaagacaaaaaacaaagaagaaggtggggagaaagagaatgtcccctcttcatggcttggttatagagaaaaaaccccaggtaacttgcccaaagcggttagtgtaaattgcgtgcttgttatcgggcgataagatttttcaaggcggtcaaaagtggcgcccgctttcggagcatcggccgtgcctgaagcccgagattatgtcatgaagtaatgcaccagccacgtgatgtgtattcctgtgcatacttgtgcacggggccgatctaccgcaccgagcctcgggtcaccttaccccagaatgcggagaacccctcataaaatattgatcttgatatgtaaacggcagagtacgcatatatacatagttcaatgcttattttcagctactttttctgataacttatctctttatcgagtcttccatcatggcatataactcaccaaatcccatcccgttctcagagccgccttacattcgtggcctcccttctccctacattacgcctgcccactgccgctttcaacaagcatgtcgtaaatttgcaacagaaaacttgattcagtatgcgttggagtgggagcgtgaaggaacagtccccgagcatgtcttccacacattctgcaagcataatatgctgttgcccaacatgccagccccattacccgtggactggctgaagcgactgggaatccacgatatcatgggtgtcaaggttgaagactgggactatatctacactggaatttactgtgatgaggtacgccatgagcatcagctatctaactacgctttataattgctaggtaattgaccgatggtttgccaatagatggcccgttccggtctcagtggcccctccggctctctgaatgctggcttcgcttttggaattgcaccaatctataaatttggcagtactgagctgcaagagcggttcttgcctgcgctcctcacaggtaagaagcgaggctgcattgctatcacagagcccgaggctggtagtgatgtcgcaaatatcaccacaacagctgtcaagagttccgatggacagcactacatcctgaacggatcaaagaaatggcaagagacaactctacagtaataatagagctatgagctgacaccaataaccaggatcacgaatggtatctggtcggattatgcgaccatggccgtgcgaaccggtggaccaggagccgcgggcctttcggttttggttgtacctctaaagggccaccccggtgtctcaatgcgccgactcaaagtctcaggtcagatcacaggcgggaccacatacattgagctcgacgacgtcaaggttcctgtatcaaacattattggtcaagaaggagacggcatgcgtatcataatgaccaacttcaaccatgagcgacttgttattgccgttggagttactcggcaggctcgtgtggccctttctgcggctttttcatactgcctcaagcgtgaggcttttggaaagacactcatggaccaacccgtggtccgccaccgtctagctaaggcaggcgccgagctggaatccatgtgggcgtggattgagcagatcttgtaccaattggtccatctcagcaaagaggaaggtgaccgccaacttggtggtttgacggccctggctaaagcaaagtctgctatggttttgaatgagtgtgcccaaacagccgtgttgttgtttggggggagtggatttaccaaatctggtcagggtgaattggtcgaaggtatgttcgccggagtattggtatgtacttggaacaagctaactatgcctctagccattcttcgcgatgttcctggtgcccgtattccgggtggatcagaagatgtgctgcttgatttgtctgtgcgtcaattggtcaagctctatcaggctgaagagaagaagttgtcaccagacgccaagatttgatctaatcatacatcaacaattttggagtgtcaactactcggactttttcgcataatatactcgaacttgaatttatgtcattacacagtactgagcaagaaagctagattgtcatttgcactgacatctagagcaactatgcaataagaatagcaaccatcaaccaatactttccttaacagcaagatcgggattaatctttaactcgtcgtttcaatttggactttgatacccgtaaacaactgctcggtggcaattcccacttgcgggcgacaggtttcttcttgctcattaaatctttcagcagggggtacttcttcgccactgacgccactgacaaatttcgtggacattctccgtcaatagtttggtcttcataagccccttgctccaagagtagcgctatcaaggcctcattgatcacatattgcttcacagctttcatttgatttcgggttctcaaaagcttccaaataattttgtttccgggtttaccacggcaacgagtactcgctcctggtttgaaaacaagtttaaagatgtccggattctcaaatttggcacctagtggtctcactcccttatggtttcgtagattaacatcggcgccagacgccaggagcaatcgtacggactcctttgggacttttgggactttctcaatcctagggtctgcttgatggcctagagcaatgtgaaggggagtgtttccttgcgaatcctgtgtgtttggatcagcaccagacgccaagagcaatcttacgaactctgtttgggcttccaaatctccatagaatgcgtaacagcctaaggcaacgtgaagtggagtgtctccgtccaaatcttgtgcgtctaaatcagcgccagaatcgaggcatagactgaacaactccttcgtcgatttccattggcctctaggaatattgtgtaggccagtcgataagttgaaactgaattggaaatttggatttgccccgtgagctagtagtaacttgaccacagcaatagcctcatcatcttccttgtattcccaggattgctgccaggattgccgcccagatttgttataatttgggtacccacgtgccagagcacattgtagaggagaaatacccctcatcgtgtccgcaatttctacctgggcgccatgctggaggagaagtctgctcatgttgtagtctcctagagccgcagcatatcccaaggcggagatatctgttccgatgttgacttgggccccattgcgcagaagaagctccacaatgttcgtacgaccgaaaccgatagcaaggagcaaaggtgtgttggtcagggtataccggggctttattgggatgttcaagtctaggctgttgcgcgatataatgtgctggatattcgattcatatcccctttgtaacagccatcgcagtacatcatttctagtacgtgtgtcttgcttgtaaatggcatgaatcacagcatcatggatcatgcgattgcatcgtagaagtgaaaatatgtatctgtaccatggcagatatgaagcaacaagacagattacttcggagggtaaggagccaagagacatcttgaatgaaactggaactcagtccacacacaacaagtaggacaattgacggaacataagtagttgaggagttacatatcgtgatcatcaattcagttaacccatgtttagccctaaagtttctggagatgatgagcctactatgactcaatgagatacttgtataggtatacttaaccacttattaatcgtctgttgatatctgcttaacacttagtgcatagtggttcttgaacagcatttcctgctcgtttagtaggcgtcctaagtggttaccttctgcacgcattgacgtggccatcaatcatacatacaagtctaacttccaaatctaccttggaatgaagattcagaaaaagtgtatcttatcccatttcgattattgctctttggagagagtatgcactattataacatcaaggcctctgttatcactttacctctctcacttcggtagcacaagaccccggatactgggcatttgggtgaatctggctgttaagaaattggtctaattaaactggtcgtctgggttaataagtaatattaaacattccatcaatagatacaaacttctcaatgttccaaccagcttaattagaaaatgtagctgacgacgcaaaactgcatcatgctttaccccttttagatagccacggctttagagcagaaaatagtccagcaccaggaaggtcaagaggacactggccagagtcatccgtgtagtctggacagacaccgtattcaagaaccaatttgatcatagcatccatctcactgaagtcaggaaacggttcccactcactcaaatcctccaaatcttccgtatcctccaaatcttccgtatcctccaaatcttccgtatcctccaaatcctccaaatacttcaggaagcgctgaagctcgtcggttcttgggtcaaaccaggtggttagcccattccgtatgaggaaattcaggagctgagctccttcttcgccgtggcattggactttggcgcccgcatcgaggagaggctttgctaggtttatgttccatgggaacgacactgcatgaatcaatggcgtactcgattcgtggtctttcaagtggacgtcggctcctcggctcaggagcaacctgaggaatccttcttgtgtcatatcatcacggaatacatgtttgataacgaggtgaaggcaacccccttcctcacaccacaaggagttcacgtctactccgtacttaaggaccaagtgaagatcctcaagtttttctcgaagtatagcgttttcaagcaaaactgtgagctcgtcggggaaaaatttagctccgtgagctataagcaatttcgcaaaggcttcagatcctcgggcgtcgcggtattgggtcctgaaaacacgagatatgaccgacgcccccacatcatccattgcgtgtacatcagcgccaagatgtagcagatactctatgacaccatcatcaagagacccgtaatacagtactgcatcatgaaggagaggggcctcgttcacattggcgccatataaatgcagcacctccaccactgacctgaaatcgtagttgaaggctacttcaggtacgtcgggtgactggagctcacgcttgttgtagcgaccagcctctacccaagccagtaggcccccgtgtcggatagcacgagacagagtgatttgatctcttatcttcgcgcctttttgaaggaggaaaagggtcataaccgcattcccccgccccaccgccacttccaagggggtgtagggcatggtgtcccagggagggtagtcgttgctgaggtaattcacatcggctccatgtttcaaaaggagatctaccatacccaggttatcatcctcgatagccaagactagagctgattttgcttccaatcctatgattaggctccatcttccctcgtatgtcaagcctcggttcagatctactttccaggacaatagatgacgcatcccttgcatagcaccattcattgcacaccaatataaggcaagttcccctggatctgtatcaaggtttcgcttgtaaagatcacgaattaggagatcgtgaagatctctgttggtgcacatcaagccaagcacatctttacacggtagctctgacactatcatgtttatgatttcgagtggtaacgaaaggaggggcattttgaaggtcagtggccgggagcaaactgggcgattgaggatatgaggttgagaggatgataaataaacaaaacacgcgttgggactttatttcatgcacatatccgtgacctatgtgatttttctaactctcatactggataactaatatattgagtgagatctgaatacctgaacttggcctggcagcaaattaagcataattacctgaattagttaattaccattacagagagagtgtaaacctggaaaaattcatgaatttgtatgcccaaagtgtatatagggtcgtcgggccgggttattccgtgctgtaaatagatgccggaaagcgatctacattcaggcactcaggcattcaggcattcaggcattcaggccctagttatgagtatccaatgagagatatgcctggcatactcttgcttatctccaccgtccacacatgtatttactatgcaagacatctctgtatatgtactccatatatagctatatatatgaccttcttctagtaacatttggagtttaaatgatcgatttagcttatgtttcctctggttgtgttaagccaaagttgagcttaccgaatatagcctagctcgatatcgggatgacgaaagacactggcgcctggctggattcgagggtgcgcctcttttgctgtacaaacaacggacatctactctaattacaacttcagatacacaaaaatggtgaacgtcgcattgatcggtggtactggtatggtggtaagtgtaaatcctgcaagcaaagctcctcgatttactggtctcgaaattccccaagccgagcatacccaggctagaacttcagctaaattgcataaccgatagggctctcaaatcctcaccagccttattgccaatcctgttgtaactcgtgtggacaccatctctcgccgtaccccgtcagtcactagcggcgcgcccccagccaaactcaccaactttgtctctagcgataccgccacctggtcaagccagctctcctccctaagcccgacccccagcatcttcttttccgcgtttggaaccacaaaagcagccgcaggcgggttcgataaccaatacaaaatcgagcatgggttgaacgtcgagctggccaaggccgcccacgacgctggcaccaaggtctacgtactgatctccgctaccggcgccaacaaggattcgaactttgcctacccccgcatgaagggcgaaatcgaggaggatatcaagaagcttggctttgagcgcatggtcattctgcgtcctgggctgattgctggtactcgtgaggaaagccggccgtttgaggctggagttcggttcattgcgaattgggctggcaagctgaattccggcctcaaagatggatgggcccaggacgcggatgttattggcaaagctgctgtcaatgctggtcttaaggcactagaaggtgatgttcccgagggcagtgagaaggtttggaccttgtttggcaatgatatcatcaaatatggcaaggaaggctcgtcttaaacgcattgatgcgttcgaataagctatgtatatgcaattattatccgtatggtttgagatttatcacgttatgcggctatgaacaaattgtctggaaccaattacttgatggcattgatcgaaactcaatatgactttattttagaaatgctgacctccctgcataacatgatcatttatcgcctgcggtactataaacaaagaaagcattcaatctcggtatgaaacatgagtcccatcctccttcacatgaatactacgagccttatttggcgtcccgcgggagctggaaaccccacgatcctgattccgaacaggtccgtcctcctccttggtcctccaagcgctggcatccctattggctgggctcatatccagcggactcttcttgccttcttgcctgctttccttttcattggccgcgagttcgctctccggtgctgtgttcgtcgggtcgaatgaagaaggatgtttggccacttcgccgtccgtaccagatttggcagtctctgagcgctccgggttcaaggtttctcggtcgagcgggccctgacccttttcgatctgggaaatcggggttgtgctaaagggcgttcttgttgctgtcggggtggcgagggattgaatagtaggtttggggacctggctccgggtggcttgctggccggctgagataatggttttccacattctgtgagataggaatatatctggagatgttttcaggtgcagattgtagtggttcgtacagatatctcgttgtggttgagcttgggtatcgaaattgcaagatgtatgttgtagtgaagtgaatgagagggaaggaacttgttagataaaatttcttgttaactattaggggaagtccattacaagtagtctgtcactcttctctgtgttccaagttctctagaccctaggatcatattgacgtcacttggtcagaaacagtcaggctaacccaatatggtaatgagcttgcccttgccctaagtgaccggcttgataatggtatcacaaggcctttgggggttttagcactgagttgcgcgagatttatatattaattcactcaaatctatgtccggatttgcataatatatgccacagtcagaaatgttctatcatatgagcagactggattatggctgaagcagtagtgaccaagactgcacacaatattgaacccgccatgagaactgtcttcggccactaataactaatatactaccggtcgaacttcacacaatgtagctccaggtcatattttgacgactggcggtccacgagccggtcagaaatcgccaaatgatgtatggcgaggtgacgctgctagtttataacgttctagtaataggcagaggcgccgtagaggggcgtcaagtactcgaggcggacgaactggctcgggattgaagcgtgcccagactcgtcaggatattaggacaagatccatcggtcttgtgtccatccaccaataccatcgaggtgtcagggtggcctagcgcaaatataatctagggtaactcatatcgaacctgaatggaaaatccgaaattccattagccaattagcaatgattacgaggtagaagggtctttggatattacatccaacgtaggttctagtaagtgatggtagagaaaaaggaaaaaaggaaagagaccctagaatctgatttagtgctgtcttcttgatgtgtaccacaggtcgagcatttacacatgggaggaatttcacgacaactgggaacacgtcaatgtgagggcccactcagagaagtacgatctaccaatgatggctagtcgtaggcctcactcaaggcgagtgctgatgagatgcacatgcctctttggtgcaggacgggtgggggaaagtctcactagttgcatacaactgacatcccggctgacggttgccattggatgattgggccggctgcaggtgaggataagtcgatcggtcgaccaatccccgtacgctcaaggaaatgtagacagtgggctttttactgtccagcaccagaggtataattaccatcaacgatttgtcgccagttaaaggcaggcgtgtgtagggtgcgggaacctccgttcactatcagatcacgggatcagaaaaacccgacgctgtgggagcctatatgcgggtcctagaattcaattctaacgttgaggcacgggcttcctagttgatagcactcaaaattgtctgcggtggctctgactagataaaaacacgatctagtatttcactgggcaacttcgcctgttgggcagaaacgacaaccatgctttgcccacacccacggcctgatccttgcgaggagatttcggtggtaagacggagcgagagggaaaagagcaggggggcaatagaaggtgattcgagggcttcttggggctggatgcaatgagcttgccgcagcaaagtattgatccaccgggtgtgacggccattttgaggctgtgagccatcatctaggatgccagttgccaactcaacatcttgtcatggatcatcttcctaggtccgattctgggcgtaattgagcggcatttgccgacgatcacttgtcgtactggtgtattgtccagaacaatcggccaaaacagcaagcacagaattctgcaggattttccatttcatattggcaatctgtcatatttcgtcattgcaaataacgtgaatggcatctgggtcctcggtggagcttgcagagaatcctaaacggcgatccacggccttcgacccagccttcgctactaggaattggtgcagaaagccagaaacaacgtgccacgtcagagtctctgggctttggtgcagctgcatatggttcagtaatatgtggaatgtatcacggttcgtctgcggcgagcgccgtacatcaatccgatcctatcatttccgccataagagcaagtgggtgatgatgaacacacatatgagcgggggcaaatgcatgatccctctttgcaggagtgagagatcagctgaacgaaaatagatctatctggcctgcatccctgatttcggaggtgtggcacaagaactttcaattgcgtgttccgtgtccttaaacccgagtgccaatgatagagcctcagagactctagcactgccaattaagtgagtgctattggctgacagacacggaccggaaaggcgcagcaggggtcgaaagacggccgagtctgaattttgatagactggcgattaaggctcggcaggaataacacaaggtgacaggggttaatggttgcaaccacatgctgagacccaacatggattaccatcattgcccaaatgcaggaaacgtaagagccacgaggaggaatgaaggcaataattcgggatgtgcatgcatctgcaatcacacagacagcaatatcggatagatacttctgtggataaacatggcgttcggtcagaatcccgtgtcggtgctcatgatagatgaggtaatgagccaatcaataatggcagctatcaaaaaatcgcttcaggatagaacaacccattggggtggagtcacaagtggcgtgcagagtcccgtcatattcgcgaaggcagtagcttttctgttgcatagagacagggttatccctgggcatgaaagcctgattattgcatcaatacgacatctggcaaatgccgggaccgactcggccatgcaggagtagccatgcaaaacgcaagagaatcacaagcgtcgagtccatgcgaacagcatccacatgaaagcggggagaggcagatggcgacagcataattgcagtagtcgaatctggaaactagagtattgcagccatgaattgagggattttcggcccatcgtacatcatcgccatgaggcgggaatcgccacggctgatggttgcatgcatccatgaagcaaccgattgttcacggtggctccattcgagatgcaatggccatcataccgtctccactgcttggagaactgctcacagccaaccggatcaaccgtcaggcaggtgcgatgtgaaatccacggactggaaccacggatgataagccatcgggcactgagaaacgtcgatcaacagtgggacgaggcaaacatgggagaatagagtcgtggcatacaaacttcgaaacataaataagcctgtcaacgcccctatgatgctgtgaagttcacaatcatccctccggtttcacaattcgagtctgaaatcttcaagccagtccaatagatcttcctcataaaaagaattcattcgaaatttgtttcaactttgttgagcttctcgggtcctttcaaaacacagacaaaggtcggcctatcaaatccgacaagctcgggtgctgtcaggtgcaaccaatagcagcccgcattcaagctgaaacaaagacggagagccgtgagcaagtgagttatgttgtacttgcagtttgagcagcactgacagatctaataggcatgtgcttttacaaccaaaagagatttgcgtgtggagactggagctggaccagctttgcccaccgatgcaactatgaatatcgcaccggcgagacatgcggtatgagactcgtcaacatcactgagaatgagaagaccaattgtcgtctctgcgaaaaaatcgagaccaaaaatcgccggcgtagtgccgaagtcgaccgtttggaccggtggaagcgagagggtgccacacttgtggcttccattgatcggtctcacaaactcattatggacttggataaagagatccgcgccctgcagcgggagcgggacgaacgaaggagcactctcctaagatagggttggcttggatttgtaaaaccggtattcctttggttaatttttcttttttcctctttcccttttggacaggtgaataacaatgtcttgacttttgtgtcgggtccttcgtgggccaattgtcctatcgttttcttgttgcctgtcactgtttctttagggggatgcagcgaatttcatgtttcaccatttgtccgcgacattaagtccaaatcgagtttctgcaaggtgatgggaaagccgtatcgcctttgaaaagattgaggagaaatttaattggttcaaactccgtattggtttttgttgataggctgttaagctcccaaaaaagaatgtcaatagggactagcccagtcataagcgccctttctcctgggtgagcggttcgctgagacagatcgagtctcacaggacaaggagtggaacctgctgcagctagacaaaaaagacatcgaggcctgacaaatatcaaatggccattcataatcgaccagtccttgaaggaagagcaatggtacctggtgtcagagcgagtgcacatagtgggacaaaatgcccctcacaacacatgcccgcacgtgatgaccacctgcttagataacctaatagaatgaacctgtcaagaagatatcttagtggcaccatagaaaagaggcgaatgaaagtggaagtggttctgctggttaggagtgttgtgagaagaatccagggctagctgggctaaataggttccacttcccttgctctatgccgtggataactccgacattgcgaaatcaatccagctctaaaacgatagctttgggcgatctaagtaaaataatgacaagtttagtaggtataactgaaattgaaatcgataaaagtaaaaagtgaatgcggtagtgaactgaaggctacaaaccagcaagttggggaactatatatcacggcactataatcggagaatttacttctacatgccactaagcaacacccgtgcttcttcagcctacgtgtacctatctgcttcaatatcttcaaagcacaaagcgtcaaattggaatgcagaactgaaggagagcgctgagactaggccgatgtgcatgccacgtcacaagagaacagcaccaaatgcagccataaacaaaagcccacacgacagataaaagatcaatgttttgtttggacatgaggtgatgctatgatattgcaaccgaatgattatggtcaaactattggattcgagtacctgaaacggaaaaagaacaagagaagatttaatctattttatgtcaccagcctcgggctcatcatcgaccttggccagcccttgttcccggagaagggaatcaatctcatctgcagtccataggtggtggtagatcttgccatccttggtcttgcccactgttgcaaactcgactgcgtaaggtagaaatgttaggacgaaaacacaatacagaaatgaccgtagaactcactcttctcgctgctcagctttgtggagtccatagtcttgctcagcaccttgacagccatagcacacgcctccttcagattgcagtcctccttgtaatcttgcttgaggagactctgcgcacttgcgttgtttgcgccaacgctcgtcgctttccagcctccgtaatttccactggggttactctggtacaactggaattgacggagatggtcatacccagcgtagatgaaggagacaccaaacggacggagacctccgtgttgggtatatccttgcttcagatcacacaatcgacggacaagttgttcgcatggaatgtcttcgttgtacgtgaggaggtagcgttgggcgttctggcgagcatagttgatcagaatgttggcatcggcgttcatacccgcaacagcgcagatcatgttactggaaatcatcagctacttatctcaatactaaacacagcaaatctggctattttatttgagacaaaggtagtgttggcgtactcgttgattgtgtagagcttctcagcggaggtatcctgctccagcagcttgctggtcaccttcctctcagcagcgaggacaataccatccttggctaagacaccaagggctgtgccagcgtgagaaatagcctcaagcgcatattcaacctggtagagtcgaccctctggggagaagatggtggtctttccaaaatcgtcataggttagctggagctgcacaagaggaatgacggtgtgcacaaaccctcgaatcgtatctccgagacatcgtgtatgaataaaagaaagcgaaaaaaactcaaaatgggctaaaggtgagggttgattgtgcgagacaggtggttcgggatggtgaaggtcgatggtgaagacgtagaagctccaggcaactcgccctggcgcgtcctctgtcatccgccaagctcggaccacttcaccacaccaaagcttcgttgcgacgatttcaccaccttgacccgcaagtacggattacaagaccgatttgcccattactttgcattttaaattgattcatatcgattgctatgctcagatcaacatacaccgctccacctcctttgccatcggggtggacacaacatcgagcccccacaggttggtcttgcgctgggttcgagtgaaaggtcttggttctgactattaagccaggtcatttgtactattacaattcttccacaaaacaatcgacatatacccggcctcaagaaacagctcctcagaccattcaggctgctccagacaccccagaagcaacatacaatccagagacgctacctccgttttcttcaacaccatatggaccaatagggtttgcctcggggccggcgcaatttagtccaccccagaactcccgcggccgcggaggattccgcggtggnnnnnnnnnnnnnnnnnnnnnnnnnnnnnnnnnnnnnnnnnnnnnnnnnnnnnnnnnnnnnnnnnnnnnnnnnnnnnnnnnnnnnnnnnnnnnnnnnnnnnnnnnnnnnnnnnnnnnnnnnnnnnnnnnnnnnnnnnnnnnnnnnnnnnnnnnnnnnnnnnnnnnnnnnnnnnnnnnnnnnnnnnnagccccccccggagcccccgcggccggggaggattccgcggtgggagaggttatcatgatcatggacggagagaaaccgaagatcgaccaagagcgaagcatcctattcccgactgcgccccgtggctactagtaaagaccaagcttgggaggagatttgtgcacaatccggaaacaaacgaaagtttttggaaatttccagagcaagttttgaagggtgtggttgaatttgatcgcctcgagcgtgagaaaaaggaaaggaaagaacggggtgagcccgaggtaccagccaaaaaggaaccgccttcaccacagcatggtcgtatagagcctgagccgataccgcaagaggcggaacgtgcagattatgactccgactatgaagaggtcgaggttacagacagcgagggagaagagggccaaccgtcgaagcgtgcacgagctgaaagtgagggtgtcaaggatcagccgctagagttcaacgaagaagacatggcatatcaactagcagccatgggtgaagattacggactagaccccggggaatatggcgaggtcggagaagaagattgggaagagggtgcagagggcctgccgctgaccgaagccgatgccgaggccctcttccgcgacttgctggatgacttccgaatcaatccattcacgacatgggagaatgtcatcgaagaaggccgcatcattgaagatacccggtataccgcaccctcgaacatgaagacacgacgagagatattttccaattggacccgggacagaatccaagatgtgagagagcagaaagcgaagcaggaaaagaccgacccgcgcattagatatctcgcatttttgcaagaacacgccactccaaagctttactggccagagttcaagcgcaagtacaggaaagagcctgaaatgaaggactctcagcttggagacaaagagcgcgagaagttctaccgggaccacatctcgcgtctcaagcagcccgaaagcactcgcaagtcagacttatcagccctgctcaaatctgttcccttggacttgttgcatcggtcatcgaacttggaagccctgccaaccattatcatcaccgatattcgttatatcggactcgcgcccgaggttcgaaatccgttgattgaggcatacatatctactctgcctccagcgccggaggtacagatgacggcagaagagttagaagaagtcgaccgaaaacgaattgaacgggagaaacgcgagagggctcttgcagatcgggagaagcgggtggaggaagagaaacggaggcagcgaggagatcttctccgtagcaagcatcttctccgagaaggcgaagccgagattgaacaggcaatgcatgtcaacaaggacggactaatgagctacatggacattgatcaggcagtagacgaggaacagaagccgagtcaataatagttggtcactgaatattacatatcacttttgtcgagataaggacagtcgtgttcatattgtacatcaagaggcaatttgattataccaatgccatccggttcctgagggtatcactgtagatgagggaaatcatttcccttcacgtaaacgattcatcattccaccatcgatccgatcatttaaatctccaatcatcccaatcctcgtcgtcatcgtcttcactctcgctctcaacctgctccactgcgccagatcctatcggctcatcttgtgtcttgtcttcggcgcgggatttccgcagctcctcgcgtttgtgtttgagccttcgcacccgctcttccagctgatccatctcatcaaactcttcctctaaaagccgtgcggcatcctctcgctccccttccatctctgcctcacgagtgcgggctgtcgacgtcttcgatctctcttgttgtgcagcgagttctgcagccgtcactggcgctgcggatattgtggcctcagctgtaagagcggctggtacatggggctcatcggactgggcggcgacctcgcgttcaaatgctgcccatgcctcttcgtcaataggcgtggatggatcttcgcgggggcgcgtagttggttcttctgcaaggtctgcagctgactcaacaacctcttgttcgttgtcgagtggaggttctgggccagcgacatcatcctcaacttgctccgaaccttcatcctctgtagtgtgctcaatgcttgctgcgccagaggcagactggaatgtatcttgttccgcagcgcgaagcttctttcgcattactccatctccactatcaaccttgcgctttttggtgacccggtttcctgtcgtatttggctgagatgtgcccttgcgggaagctaattcactgcggagtagggatcggacgtcggccatattcttcaatttgtaaggataagagatatgttatggtaggtgaaataagttcagaaacaaactggcggaaacagaagagcctgtgatgaagagtggggaatctggagaagctcaatcttaagattcaccgaagggcatttcgccgcgaacctgtggctggtgacaaatagcacgtgatgacgcatccagtgaatgacaaagacgggagccaagccacttattcatctctcttcttctcctcacatcgcatcggatctcttttctatctaacatctttcaaccatcctttggcgttattgctttcgccacttgatcttcgagcatttctgctccaatctcaactcaaaccgtctagccctatttttgactgcaaagtgcgtgatttgggctcaaatcactccacgcgaccccgcttagcgccaagtgtcgatttgacgcgcagcaagggattgcacagtccaccataacacctgcttgagcgcgttctttgtcaccgcgcgtcaatccaagaaatattgcgcagagactagatcggttcttttattcgatcgagcaaaagtgtgggctagacagtgacgctgttgtgctgtcttcttgtgtattacattagcgccttgagctcgtagagacttttgtcagcctggggtaacacctgaatttcgagcaagtgaagagacctatttcctgccacgcgctgtagtacgcgcgtcaaatcaccattatcatggccggtaagctttcgtacaccaccactacacacattgctatccgatcacttttgagtggcagggcaaccccaggtctgggttgcgactatttaccagaagacaagctaacagtgagattagatgaaccccgacgctccggccgagccaccaaaggccaacacaagaaccttgaactgccagatgatcacgcaaaaaaaggcaaaagcaaaagcccgaaagaaaagagcgccaagttgtccgccgaacccacacccggtcctagcgaagctgggggagacgaagaagagattatccgatgtatctgtggtgaatatgaagaggaagaggatgtggagcgtgatatgatttgctgtgatcaatgctcagcatggcaacacaatgactgcatgggtctcacattcgtgaaaggtcaagaaccagatcaatactactgcgaacaatgtcgaccagagaatcacacaaccctcttggccaagatcaacgcgggcgagaaaccctgggaagagcttgccgagaaacgtcgccaagaggccgaggagaagaagtccaaacggaaaaagggcaagaaaggaggccgcaaaggaagacccagtgagagccggacggatgccagcacaccagctcgcactgcgccatccactacaccaggccctagcggttctcctgcacccgctgtgtccgccgtgcctgcctcagccgaaccggagaaaaatggccatgctgttgattctcggcgatccagcactaacaagcgcaaacttgatgaggcaatggaggcagaaaacgtaaatacccccatcccacccaatcatcacattcaaaatgttaacttgcttatttatcagggaccacaggtgaaacagcaacgggtatccccacagtctacaccggcagctatcccagaggcaacggcaacccgaatcaagacagacactatccccgaggcgcgtgccattggagccctggaggagttgatgcctgcccgcaagagtgtggccgcacacctcatcaagttgtttgtagaccagattactgcggcactgaaagctggttcttttaccttgcatgcgaaccagtcagtggaggacatggcacagcaactggctctatccattgaggatgccacgtatgagagtatctgcggacggtcaggcgagccgaatgaatcatataaggcgcaattacggtcgatcatattcaatgtaaagaagaatacttctctgcgagatcgtctgctcataggtagtctgtcccctaagttgctgtctcagatgacatcggcggagatggctagcgaagaactgcagcagaaggacgctgagatcaagcgagaagcggacagacatcacaccattattcaggaacaaggccctcggattcgacgcactcataaaggagaagagttgatcgaggatgaacaccatggcgcgaacgagtctattttctcccgcggaccccgtcgcgctgtgggggatgacggcagtccaacccacaaaagccctaccagccccatggggccacatcgatcaaagacagagatagatggatacgttcgtggtctatcacccgagggtgctcaccatgaccacgtcttccctgaagtggctcccgccatctacgagccagtgcctagtggcagggtccaagcagatgctgagatcgatcagctcttgcgcgacgatgaaccctattcacctccttattcgcctaaagacttcgacgacgacggcaccatctggcgcggtaaagtaacgatgcctccaatcggggagttctcctcgtccgcgaagcatgtgggaggcgcggacttgagtggccgaatcccatggagtcaactggcgcccgccaccttggttgttgatggtcgtatcgatatcagacgagcaactgactatctatgtggccttcagttcagcaagtctaccgatgtgtctgtgatagcaattagcagtcctgatcagcccacggatcgagcaggcttcgacaaaatgtttgactacttccatagtcgtggccgttatggcgtcattggaaagcatccgctgtccgctgttaaagacacctacattgtcccaatggagatcggcaccacaacgatgcccgagttcattgagctgctggaaaacatctcactggaagtccccattactcaacgcatacttcttaccattttcgttgtcaagaccggcgaatccaacccttcatctgtccagccgccatcccaccaggctagccaagagccacctgtctctgggagcccctcagtcgcggcgactcctcagcagcctcagttcagcgctggaactgcaccaactcctccctcccacttcggtggcttcaactcgaatcccgcaacgtacgtccagcaggcccctgcacagcaaggccagctcacccctcaacaccagcctgctctaaccggcctccccgccgcggtgcaagtcctcggctcacaagttgatgcccccgccatccaacaacttctcaagactgcgcctaacgtggacatggcgcagcttagtgtcgttcgcgacattctggctcgccaacctgctgccgctgctcattacgatactttgatgcaggctctatttgagacccaagcaaacggccatgtgcctcagcagggtgtgtaatagagctattcatttccatgatagccatttttttcctgtacagtttatcccattttgtatttccttttacaaggctgcgcaatgctagtcaggtgttcaggtgaaatctccagggctgggaaacgggtttgttttaggaaagtggaatacccaccgccaaatgttttcgaattttatgctggttctttactcgcaaaaatggaaccgattctagttagtatcttatacggcttgtttagccctgggtttattgtaggcagattgtaatcatgcactggtaaagttctgcatttgtagtcactaggttccattctatcactagtgatatgtattatttctctattatgacacagattgagatattccatcctatcaggtggaaagataatatattatacacgatttcttgtacatctttcagtgttgtgagatatcgacaagaagcagaagaatgaaaaatgaaatggatattgagcacttatcctatgacctccctaaccgtcgtttgagcatcatacacgagataataagtaaaaacgcctgcgctatgcaacgggtccccaagctttcaagaacgacgtgaagtcaacgaaaatcaccatccttcaccatctttcaccatcttccacctccgcggcgccgatatccaccgccgccgccaccaccaccaccgccatatcgaggaccccgaccagcaccgggacgaccgccagaggtgtaagggttatcatcttcttcatgatgacgaattggtggagcccggcctttcagctcgatgctcagcttcttgcagttcttgcgcatgtctgagtaccccatgtgcatttttccgaaaaagtgatccgccagccggcggtcgttgtcaagacgagacaagtaagctccgcaaacgtcacatacttgtagcttctggtggccggatggcccagaggtatcttgaaggttcttgagatcgcgctccagactctccttctggtgcttggaggtgcggactttgtgcatttcactgagtgctagtgcgacagagcctgtttcgccgagaatcgagacttcttggagaccggagttgatggtgttggaaaggtcggcaatttgtttaagctatataagaagttagtgaactccaacggagtccatctgattggagattgaagattgaagtaaatttatacataccaggtcgttcgtctgccgaatctcatccggcgtcttttccagtcggcgctgcgcagtgtcgattcggcggtcacagtcgtcaatgtacttctgcatgtcgcgcaagtaatcgaattcgaacccccatttcgccttctctgacgcagacgcagtgtcatattctgtcttcaagccttcactatggaccttggggcaaattccgagatcttgcttggtgtttgtgaacaggtcgtgcgggcaggtgccaacaatgtaagaacggcaaactttgctgtctgtgattgcgagctgggaattgcgaccctgtgtgccagttccagtgagctgatcagctatagacagaagcaatgttagctcaacttaaagagacttgttgggggtggccagagctcggaaattttgagagtcacaaaaggagcaacatacctcccatgagctgctcaagcagctttctctgttctgctgccatgctgacggtgtctgcactaagctggaaaggaaatgaaagacgaaattgtgtcaacgggctgattggcggcaaacgacgaagtcttttgctttggatgcttttggcgccaaggaaggcggtgaggctccgctgtcaacagcatctcggggattttggagtttggcttcgatctttctttcgatgtggagcttttatattgacttggcgattactgaggtctgattttctggggccatagtcaattaggctcatcgcttcaccgagaccccctgccaattgaccagtgacaaccgcatggacgaagaccgagctccggcaagcatgaagtcatgacggtcctttcactattctcacttccttttgtcgcgcttattctctcattatggagctcctctgcctttgcgtcatcggactatcatgagcacctcctccttcaacctctcccgcagtcctccttgctagcttcttttaacttccgaagtaatacgtcgcaacaatcattcgaccaacagcattttagatatttgcctcgcgcgcttggtcagattctccaacacgcccacacaaaagaattacacctccgcttcaccaccggcagatgggacgctgaaagctggggcacacgaccatggaacggcagtaaagaaggaggcactggcgtcgagctttgggcgtggattgatgcgccggatgatgaagagtatgctcctcactcgaaatatgttataaaagacacacaatgctgattgactagggcttttgccaaatggatcactctgacacagtccctctctggtctattctgcgcctcactgaacttcgtggactcgacccggaccactcgacctgttgtttcttttgaaccggctggggatcactcagctgctgatcagctgcaccttttgcatggaacgcttcctggagaggtagtttgcacagagaatttgactcctttcttgaagctgcttccttgcaaaggcaaggctggaatctcttcactatttgatgggcacaaactgttcgatgccgcgtggcagagtatgtccgtcgatatccagccagtctgttctgcagatggagaatgtgtggttcagatcgagcaaaccgtggacatggtcttggatattgatcgctccaagcgctctcgttgtgcgtacttttcaccggcatactctgcctcaagattgctaacatggatctagcgaacccaattcctcggcctgtgcctaatgagcagctggtttgcgacacttccaagccctataattcggatgatacctgctatccggtggagaagacaagcgagaaggcatggagtcttgcggaaatttttgggcgaagcctaaatggtgtttgtcctctcacagatttcgatgggtctagcgaccagagtgtctgccttcgagtgccccacgaacggggtgtcttcatatccgaggaggccaatgaaatcaagaaagatgatggctttacacgctgtttcaaattggcgccctcggttccctttgatctttcgatcccgcagcagccagccaacactgaagttccattggacgagcctgttttgcatgcggagcgaactatcgttggccacggccaggagcgcggtggaatgcgcattatctttggcaatccatccaacaccagcgcagttgactttatctacttcgaatctcttccgtggttcctgcgaccatatatacacactttgcatgcaacaatcacaggacacgatggagtcttgcgtgaggtcccagcctctgaaatcgtcaaagaaacgtactaccggcctgctattgatcgcgagcgcggaacacaattagaactggcgctgtcagtccccgcagcatcaactgtcacgctgacttacgatttcgagaaggccattcttcggtacaccgagtacccgcctgatgctaatcgagggttcaacgttgcacctgcggtaattcggatcttggatacggcccataatgtgccgatctacattcgttcaacaagtctgctgcttcaacttccaaccccggatttcagcatgccgtacaatgtgatcattcttactagtactgttattgcacttgcttttggaactatcttcaacatcctggttcgacgagttgtctctctagatgaggctgccgctctcggagcccagaccctcaaaggccggatactggggaaattggtggccattcgtgatcgactccgcggcaaggataccaaaatggattagttcttatttgaataagtaatcacaattacaataattagcgggtttaaggccccttaaaagacctgtaaaacgcctagcattagttatatattgcttttcttcacagaacctgaagacctgtggtattgaggccggaaattcccgctgtcactaactttacaatcgatgcacctaggaggttgttcatacaaaactgcctctgacctcattattcgaaatctgatagtacatattaacgcaacacatggccacttggtcacttggttggaccggctcgaccaatgcttgagccagacgcgaatgcttgttggacatgctcttccaaatgcaacacactatcaactcctttccaaaatatggagtcaatccgcagaaggccaagatggaggcaaggcaaaacgtcagccttcaggcgcatatcccggcgcactttgttcagacaagtgacccatttgtctgcctcgttcctatcaatggaggtggcagccatattcagaatttggaaacagatggacgagaatgcagtcgcactccaggccggccataaaacctcgaagtcttccggacgcagctcgtgaatgaactccgctgctgccaaaatgcaggtttctgcccggatccgagcctgctcacgcgccattatatattcggcctcattcaaattttcaacggttggctgcagaaacggcctcaaaatagccctggaaatactcagatgaatataatggtagttcatctcgagtgttctttctagtccgattggtctgccttgattcaatgatctgacatcggtcgatggtacagatactggtctatgccaagagaagagactttcaagcagtggaccggttaatgcgacggtcttgtggttatcagtacacatggtattaatggcacgaggagaactaatattagtgagttgcggaaaacggcgagacagtggacaacggacacggggattgtcttactataattgcgctagaacacgatcaagtattgcgtcgagttccgctcgcttcatgatattcatccaggctagagggtcaagtccactgtcaggttgatcctcttgactaagacttgtcacgagccagttatcatgatgcagtaaaggtggccgaccaaggctcaacgcaagccatttgtctgtcgaataaatgaaatacgacaaacgacgtcgctgcgcaatttgccatggaggtattcgccatgactttggatctaaatgtagtccaagggtatgagcgcaagcaacaagggtggcgagctgggaccatctgaagccactatccaatacaattgggtttggataaggtcgaatggccaaaagaagcattgtctgcacaacacaaagcttcggtgcgtggatctcatatggaagcgctttgttgataatctcgtatagtgccacacctgatggcttatcatacgcgagatcaatgcatagtctttcgtcaaatttagtgaagggctcgactattaggtatacactcgcaaggaggtatggcgggctggtgttggggtttaattggcctggtaaaccaagtatcgggtaatccggtgcgatgattctctcaaataagttaataagtctgagaccgatatctgctgggaccaaagactcgagttcctgcctcaattcaagggtcgaaacgttctcgcatccgttttcttctctgctggcagcaaatattgagggatttgacagtaaaaattgagttggctcgggtcctgaagacacagagtgaatactgagatttttgaaatgagaagccccagatgtgtcgtatcgataacgaccaatcagaaaagggtccatatcaccactactgccgagcaattgtggtgtgattataccctgcgtatcaaggcaaatagatgagccattctcctgcataagcaatggaaggcagtttgcattcgatgaagctccaacttccgaatggccagtccctggaagcccaggtgatggataaataaagctccctggactaaatccagtcggccatgtgccatctccaaagtcacccgataacgatactccagctccattaaagaaatcatgaaacccttcaggtgcagcagcaaccgaatgatttaccccatgatcatcaatcggcatcaagatatcgtagtggactgagtcaccaactggtgaaactgcacgcagatctgagtgtgggcttatctcagtttgctgggtcatctgtgagctaatcgcttcggagaaaggctggcgtggccttgaggtcggttgtagaaacgtgcattctttcccatgaagtgtacaaagataacagggaggtgctcgatcaatgcgacaagctgccttcctagagcgacaggaatcacaagcgcggttccgcttactcatgtacctacgagctctgcctgacatcctttcattgagaaagttgtcatgagcacatagtagattagtggctaaacgagggtttaagagatacgatgtccacacagtcaaatcttagccccacattccacgtgactatatctgggttccaaggttcttgtattaatgtgatttattatcactaaaggtctattcgagtttccatataaatatgattatgctgaataaaaatcttgcactaatactttcaaatctccacactttgcttgtgctctttttaactatcggtacaactattctcggagtcagcttcccgggtctagtcccctgcgaaatattgagttgggtggacaaccttcagccgatgtctgttagacccatcattgggttttcttccactttctaagctcaggcttttgttcttgccccgtaagcgcatgcttcacagtgccaactccccaaggcaggatctcggccgagaaaccgcaggaataaaccctatgcctccgacaaccaagattatgaccacccagtcccttagtacgactacaggaatggattcatgatacgtaggcagaaatatagtagggctgagcaagtttgaagtttcagttttcgtgtggtatgtatgagtcagtcgctgggcacaattcggcgtcctattcttgatgcttgacttgtggtccaagctaacagctgagcaatttaagttgtattattgctaatttgagctctcattataactaaatcaatacccagctcatgcctaattaaatagttaggctgcggttgtgattactagtagttacgtaactaacacgaaatgaaattttaagttatcgtgccgataaccttgtccccgcattgcccgggccgacctcgggaagtaaaagttaaggttgtgataacattcttttattgatatcagtttgcatggagcttagaatttaggggaggaaagaatcgggactttctagaaaaagtcggtatatcctataggcaaaatcatgcaaaaaaaaaaaaaaagagaaaaagaaagatttattagaccaatatatcagggcatcatgctcagtttaagggaacttagagcttgagcaaaataattttttatgtctagttttggcacatactccccagtactattcactcttgccgtagtgcacttgccgaagcatctgactagtgtcttcgatatacacaaagctttgtgagagccccctttcggggtgattgaagtgcccgaatgcatgtggcacgccggggtatctcttcattgtgacatcatttccagcctcttgcataagctgaccatagtactctccttcatcacgctcaagatcaaattctgctgtgatgatgtgtgcttttgcaaggcctttgaatgaaggagcaaggacaggcgtgcatatccactcttttgtcaagattttttcttgggtagctagaaacgaatgagtaaatgtaggaagagggttacaagcgtggaatagagaaagaagacttaccgtcatcgtcgccaagccaatacttcaggaaccattgctctctgcctaatggtccccaaggagaatcatggaatagcaagacacttttgtagggacaagtagactcattcagctcgcgtgttcttagacagtagcgcatatctgtcgccggaactatcattaactgaagttttagctcaatgccctcgtcacgggcgaaatgcgccatcactgcagtcatttgacctccagccgagagacctccgatagaaacactcgagggatcaacattgagcttagaggcattggttattgtctgtccatatatcgtgttagcaaagcaaacatcaaatgatattgtttttgtatttacccatttcacagcatcccatgagtcgtagatgctggtaggatatggaaattccggagccagtcggtagtctacatcaatcactttaatttgcgctttgttgcacatgtgccggcaccaagcagcttcagacttgagattgccaaggacccatccccctggagccaatgaacaacggttagcaaatccacgttagagagcgtaagggtggtatcgtaaattgcgtacctccatggaagttcaaatgaacggggaatggaccagatccttttggcgtatataccctgatcatgatctttccagctggttgagagactgggatctctatgtcctcaacacggaaaacggacggaccttgatcatagtaagtgcttgtttagacgatttaatcaagactctgtcttaccagggcatgttgggtaggtgaagctatacgtggcgggacttttgcgatattcctcaagagatagctcgtcggctctcaccatggagctgccgtgcttttcccatagttctacccattcaggatccaatccacccaagagcttgtctggtatagacaagcgccccttcgtcccttctaccacgaccgatgtctgtgtacctaccacgactgaggtttgtgtactagccattgcgatagggaggttggcaataaagagaaattatgaaggccaaaagatggtaaatggtcaattttaagtgaacgactaaaatgaattaagagatatttgacggtgttgataaatttagtcacttacccttcgatatgccttggatataatgccgggctctggttggcggcatcggccgtattgtcagctccgatctaagcgataggcatcggggtgggggcattcctatctgcgggtccaatgtgggccgtacaccccggattcgttcccgatatcgatccttccactgaccgagttggttaaattgaaacgccgttcctctgatttggcatagggtagagaagagttaatattttgtctcttacacattgcttcacatactgttctaaatatttacattgttcagccgatatggactctgtctcagtcgataaccgaagagactattcagaggaactggacaaagttgaccagtcacctactagtctccatgctggactccgccgtgttcctgacaaattcccacgtgtcgcactattaatccttgtcgtcgaggtaagttgctccaccgcccacgtgttgattgccctagctcgcccgctaacatggacatactagcttggcgaacggttcacttattttggcctcagcggtcctatgcaaaattatatcaagtatgctgtcttttacaaatgagttgatcttttgaaaacaatatctaactccgtttttatctagtaacccctatgatcctggttcagatctccctggcgcactaggcaaaggacaagcaaccgcatcggctcttggaaacttctttaaattttgggcttatgcctccaccattattggcgcgattgttgcaggtaatacatctccccttgagagattgcatcattgttattaatagtccaccagaccaatacgtcggcaaattcaaagccatcacaatctctttgggaatctacatagtcgggttgatcatcttggttgcaaccgcgacaccagctggctttaagagcgatgctggttttggaggcttggttgctgcgatggtcatcattggcctaggaacaggtggaatcaaggccaatgtgactcccatgtgcgcggagcaataccaaaatgtagagccggtgttaaggatactcaaatcaggcgaacgtgtggttgttgatcccgaaatgaccgtgcagcgacttttcatgtggttctactgggttgtcaatgttggcgccctctcccccttgattacagtcaatgttgaggcgaagagctctttctggcttgcatatttgatcccactgatgtaagttgggataagacatatttgtattacacacctgctaatttcctccagtgcaattgttctctcggctatcgtcttcttgtccggccagaaacgatatgttaagattcctcctcaggggtctgctattattgatgcatgcaaggtcttgaacattgctcgacaggagaagaattttgaaaacgcgaagccatcagcactagaggcctcaggacatttgagcaagtatccatttgcatcttcaccgcactacacggatcagtacgtctcagacgtccgtcgaggctttagaagctgcagagtaagttgggatctgatacctcaatactgagttatgcttacacatagtatagatgtttatattcttcccattctattttgtttgctgggtccagatttggaacaatcttatctcgcaagctggacaaatggcgttgcatggaacgccgaacgatctcctgcaaaaccttgacccgatcgccttgtgtatcttcatcccacttcttgactgtgagtattgaatgatgataccgaaataacatccgctaaccaatatatctctagtgggcgtctatccagtctttcgcaagtttaagatcaacttcagcccagtccgtcgaatcttcgccggtttccttcttgtctcaatctccatggtctacgccagtgtgctacagcattacatttataagtccccagcaaacagcatacacgtgtggattcaagccccagcatatatcttggtcgcattctccgaggcctttgttattgttactggattggagcttgccttcacccatgctccgaaaacgtgagtcaactgcccacatagtactatcctactcaaactaaccacaacttatttcagccttcgatcttttatctctgcacttttctggctcatgatcggcattgcggcggcgatctgcatcggtctaagcccagtgtcgcaagatccgtatcttccttggatgtatggatctcttgcaattgtgggcttcgtggcgggatgtgcgttttatctttgcttcaggaagagtgactctcttgatccagtagacccaggattcgtcgaaggagttccagttgaaggaaacgggcagcatgttatacagattgctgactatggcaaacacagtgaagcatagaagttgtctgttcaattaaatagcctatataatcaatctacttccgactattattctaacagccgttttccttacatcacacgttcaagtagatgtttgattcctccagattttagcatctataagcctccgttcattccttcgtccactacttatgtcttcctttttatacactcatctcgacaagttgcaaataataccaacagactgaaatatatactatacgtacagcctagcatttggatcaacattgaacttttctttattcaagttcaatttaatcaattcgataatctagagattgccctaaatacaatcgtggcacttgtggcaagcccagaatttgcgagataggtatatactactcttggtatccaccttccccagtgccatgcctctatcatttcaattcagccgaacttagaatcacgggcgccaatcacaagctatgccgcctatccccacagtttaatgccgccaatcggagcagcccccaatctttcgcctccgagataggcgcttgtttactcgttaacctcatctaaattgaaatcgggattctagacacgagataaccaatatgaaatccaatgagtcaaagtgaagggctcatcagaaattaagaagttcttgttggtgttcagagttaccaggcacgatcgaggtggttgttctaatatcacaagaattatttatatattacatctttacactcttgagacggtttgccagagtgagctactaatagcatagaaatttagaggtgacagtatacttagtagatatatacattccttcatatccctgggagagataatccattggaccatcttatcccctgtgaaacagattgatttggccaggaattatcatgtaaatctgtcaagaaacaaggaaactcacttgccaaaaatgttcttaactgtactccatccaggataagtatcaggggcaccggccttatggttcatgaaactatggtcttcggtaacacaagttggctctccttcggcattcataggtagggcattggactcaagcatgttctcacgctcgataaacttattttgcgcttgcgtcttctgatcactcaaagaaaggaagtcacccattgttgatttgggattgatagcctgtggtatgagagttagggttagttagcatattctgtgaagctgtcccgacaacactcgaccacgtacatctgaatggcccaatccctcattcttgccacctaaccagagcctgtcgccccatccttgtccacctccgacattgttggcgggagtgggctcggcactgctgccaccggcgaccgcagtcgtttggcggttgggggtactatcgctgcccattttgatattgtgaatattctgacctgcatatgaggtcattagcgtaatagatcttagcgagaagcgattcaaacgaagtgataaaataatgagagaagtggatggtataagtcggcgttgtatctggaagtttgtaaactcacgatgtatatgttaaggaaattcggttcaattgtggcttcaatccttgtgattgaaattgtttagctggtggatttgagatgaagttgaatttgtttacttggatttatatacgttccatagccttgacctaatcctcgccacaaccccgcatgaagtcatgatgagtacatatcactctctgtgattggtttaccattgaagtaactacgtatatcgaatacttacatattgtcaaacttgctttcccaaatgctttagtttgccaggtattcttcgcccctttgtttcttagtaccttagaagctgtatatatagatgacttatggcagtattagtgcccgaacctcgatattctcatcaattactttctagttcctttccatgtgtatatggtacatgcatggcatataaataagtgggttctagcatgtattcactgacatttaacgaagaagttataaacattgttggcgcttgaggaaaccagccgtggaagaagctctcccgatgtccacgttataggtttcggaactatatatgaacaacctgcttcatgtttgtcttctctttctctttcctattctcatgattcttactgatgacattatcctttagggagatttgatataatcatctcactacgcatgttcaaacgattaaactattgaactattgaactattgacgatgcgatacctcggttgacaggagatagcctactcgtgttgctttttgtcaaagtatacttggaaggagaacgggccaatcttcatggcgagagccaatacccgcctcatggaaagaagattgtctccaatctgctattccaatccgagaacacctatatcctatcttgtcttgatatgaatacccgggacaatcttttttggaataccgccgcggtcggcaacagaagagtggaaatcgtggacattctactcagaaatcaagggagaaggatctcagggcgttccattcctagtacacacgagccaatcgtgcagttgcttctgtggaatagcgagacctaaatgaagcacacctggaagccgacacaggcctttgggggactaccggcgactaagtatcccactggggcataaccctctcattagtgagaggtgacaattctttttgggaattgtccccctcgaccctgcctgaaatgtcagtaccgccttcctaatcgggtacctcttagaattttgctacagatgtttaaccaaattaggaaggcggtactgaaaatggagtagaggggtaaagaattagccgcagaatatactactgatgtggctagcggatctattaatctattattttggacttgaatcattttatttaacttatatgaatttagaaagccaatgttgccctccagttttcagtgggttgctcattttttgcgaggatgctccagatcataccgaaccaccctgaaagttggccaaacctgcaacaagacagcgccaaccatcatacaacccgcaaagacctgagcatgcaggaactccgaggtatcgagattgaccaaagcacctgcaattggagttccagcaagcgccccgaaagacgatatcccccacatcatgcccaaacgagtccccaagaagcttgaatccggacagaaaatcggatgtgccacaatggaagtcggcgccgtgaccaaaacaccactgagagctccccagtagcatgcccagacaataaacccagccatactggtagccgcaatccaagtgaacatagcaatcgccgacgcgatcacggagaatatcagtatcccaataggttttatatatgcgacaagcagatatggaacgacgcgaccgatgacggacgtgccattgacaatagcaaccatataaaagctaaaatcggtagtggtatgcaccaccgtgcgggcataggaggcgatgtagaaaattggcacgtagtatgcgagcatgacacacgtgagcgagagcgagaacatcataaatgagggctcacggaaggcactccagtcgataagacttcttgcatgtgctctctggcctggttgccgacacaaaatcagacatgctacaacagcaagaaataggctgatgaagccaatgctgcgaactgcccatgcgaatccgactctgggctgcagttggcggaacatgactgggaaaatgacggcccccacgctagacccaattgatgcgcagccgatggcgattgggcgttttgtggtgaaactcgttgatattacgacgagggctgggatgtaggagataccgcctcccattccgacgcagaatccttgcgcgagtagtacctattcttgtcagaaatggttcttccaatgtcagatttcggatgtacctgatagtacgaagtggcgagactggtcatcatcattccgaatacagtcaagaaacttccggatataattagaggacgcaagtatccgatatcaactaatggccccgtagcaagaccaaccattgggattagcgtggcctggatactgcctacccatgagatcgtggatggtgtctcatttggcagaagttctgtttggtaatactcttggaaagagccataggtcgtcagtaggcccctggagacaatattagcttgatacaagcacagtaagtgtgacaacagtgtaaaccaaccaagagttcacaaagacacagaagcccgcaagaacatttaaccatgcatcaaggcccccattgactctttttttcggttgttcgttttcacgttcattgtcaagtgccaagttgtccgatggtaaatgtggttgggcgccatgtgtcttctttgttgaacgcatttcgatatatgtgtgccattatgtatcaaaggaaaacagctatgaccttacagttataaggaagaagaacccttttccctccagcactccactgtggggaaaccggggtttccattagtcaacttcttcgagcggcactgggtagccgagctctaccgatttggttggctgttatgggtttttttatgtgctcgtcggggacctccgaatttctgatcttcccgacatctacggagtatgttgtacttaaccgcactgaatattacttccgcttccggaatatatatcgcctttctctagggctccatgatctaactttgtgcctctattattctctcgcaggactttcttctcggacaatttcttggctgcatgctcctatagtgtcagttgacgcgagactagaccaatcacatccacatccggggtaaaagcctcctacacattggcaatcttcgttctatatgagcaatcgagatcaactatgattcaatcgaaccctttttgtcgtctttgaccttatgaattatgtcactaattttacatcgcatttgccgaatgattcaacgcacaatcacgtcgctcaatgcgctatgtgactttatgctaacccttaaggatttccgttgatgtactccgtgaccgttatatcaccccgatctggagagacattggctattcatggttgtgatccattgctcaatcacgtcagagcacgccgcccctatagccatctgctaacccccaaagagccacctcttgtcgcaagacggcggtctccctgtccctctccagattgtgcattgctggagatccccgtttgtttgaggaagtgttattctgctcggtcttactacagtcccgaggtgatccctatatcgggcctccttcacaccgaattgtgccttctgtacccgcctattaacaccaatatgtattatccgcctaagcctaatacactacacatcatagagcttgggaaatggctagcccgctgaagaatggatgtggcgagttggatcttactagaaaaggcaatcaatggtgcgtgaagtatgggcaggcctttctgatgatctggagggagaaattccaattatttagacttattccgcgttatttcgaccagtctcagagtcttgccctagcaagcactccattttattgaaatacctcaaggatagaggcaacataagcggccaatgatacttgttgtaaaattagaagaaagcaatgattcaacaatgtcatattccagaaagcagcgttcgctatgagcgtcgatataagtatatgtaatgctggacttttgcatctgacccatctgagccaccaatcaaggcttcaggacaggcgggatatcaaattgcaagtgatggaaaaaggagtcttttcatgtcgtgaatacagaaagaaaatcgtaatagccaatgagaaccaaaacaaaacaaagtcatcttctaatgaggttactcatcctcaaactggtctgcccatgttccagtgatgggtgaaaacgaagattccaatttttccattgctgactgtgacttggatggtgcaggagcagtttcgagctggactttagtctcagccttaagcttgttctccggcgcaggcgcagctttggtctcagtcttcttgggtccttcaggcagagccgggaatgcactctcatccaacctcggtgcagcagggctctctgttgcatatatactgtcagctaagcccttgcgtggccggtctccctgtagggcacgggaagatccacggtcacggccacctcgaccacctcgtccacctcgtccacgaccccggttgtcactagaatgatctgcaacatcttctgaacggccgtcttcaaagtctcgtcgcacggcgccagacacaccgccatgcataccgcgtcggaattggctgcctccaccgcgggggtcataatcttcctcgcgtttctgcgagtcccactcacgccctgtctgggccttgagtttacgctgtctgtttttctcacgttcactatccataacgcggcggtgcgcgagttcctcacgacgtttcttcgccgcctcctgctcgcgctccatgaacgacgcctgatcagcttcggcgcgagcatgggctgcagccttcttcacagcgttctccttggctgcagcaatgcgtttagatagttcctcctctgtgagtttaggctggaagtaaacagtcagcaaggtactcttggtaagagcgggaaggactgcatacttttctcagaccaccagtggcactccgatcaccacggacagctggcacacgctgggcctcttcaccaccctcttcgaccggaccggtctgctctttaggctcagcgggcttctcatgcctggaagcactagcctcacgcacatcggcagcaggcgcattggcaggagcctttttgcgcggtgtgctttctgaccgtttttgctctgactcccttccaccgcgtcctcctttgccccgactccgtcgtccccggcctcgttcaccgccacggccccgctgcggagtttccccacgtggaattggttgctcgggagcttgcttctcgggtacatgtgcctcctgtgactctggctctgcctcggcggtaatggcctctgtgtgcgcctgctgctcttctgtggagattgggataatctcgtcgtcgaataggtcgtcagcgccgcgagtttgtgcgaactcgtccatctcggggtctgccattgcgattgggtctggataagtgcactggaaggttggaaaagtcgcgggtgggctgtgaactcgaaactcgcggaattgttgccgctatatacgcgattcgaggggtagctgcgatggaggggctcagatgatggtctgtgtgcaggctagtggagggtgtaatatattgtcgtctttcaaaatttgcaataattcatataaaaagcatatgtaacggagaaacgaatagcagggattacagtggtcacacagctcaactgatctgcaatccagctggggcagtctgctaggcggtctgctattgctgcggagcacattgttttgccgatgaactccgtctgctttctgccgatataagtcgtgcctgcgcttgtttgtactcgacctgttttgacatgctgcaactaggccgatttacctgtcaagggtaagttggtcacttcccggccccaaactcgacaagtcgaattagacatttggaatgtccatctcctcaagtcagagggggaagaaatccggggttctccacaaatgcggagaaaccccctgcttcactccaaggctgttggaatcggcacttctgattgcttgtatttcgtgatgtacgtagttgctcattcaaggcgctatctcagctcctattccttgagatatccgcgtagagacttcatcatagtttgtagatttctcacattggcgtgagtgagagatccttggtcaacggtgacctggctcattcaagggtatagacactgttttgctttttcttcttgaaaatccacgggtatttactgcacaaagctgtctgtcttcggtggggggagctccataaacaaggccaaatttacagcggagttctatattgctactaggtacatgcacagttgctggggaatcccgttgagtaatcgagtctcaagggttattggaactatcttaagtccccatcattgtgacgcaaaggctgttggcaaaacatagaagaaactgggtacatgtaggttgtagcatgagcacagaatttaatctcggtcaactatcaaccaatcagacaggatagtcaatcgctagttaaggactatgatcatcagtatcaagcagggtacctggactactaggtatacacacacttactgccattgcttgagcgtcttctcaaggtctcccagcctatcaatctgctttatatgaatcacactgagagaatctcggtccttcgataaaacagtggacttctgtcgtatcccacgtatcttatctagcaacctttctgtctcgtcatgcgcagccttggcttgttctgaggttggcgtgtctcgtagaatcttgtacagccgattttgccacgccggtaattctgcctcttccgcacccatctgctcttcgagtccagatgattactttattctgatatgtctcgatatcctttctcagggcattggtggttcggacgatcatccatgcatggaacttggtaacgaagtgttgaatcaatccacgctgctgctaacgagataagagagattcctgccatcggaaacacaacaaataaaatgagcccgttcatgatgtagagtttggagcattgtaaatgagtcagtcaaaaagtgagaacatttggaagttggagagtggtaataactataaaactttgaatctaattggctacttcctcttatacttcttagacatctcgagccaagatctcaatatctggatcatcgctgaagtatcgtcaatgccataaagaagtataacagtggtattttgatgttaatctagtgggtatatgatttcctttatatcgaaagaaatatgcagccagtcaaccgctagggactagaggggtcatgttccttttgattagggttagaaaacttattactatcactttctttacttcttcaatagcagccgagtcttaaattagcggagcgctacactgtgtgaagcaaccaataagatacccgcgatagccgctatagaaggccccacatctccgcagtcccttcggatattgcgccgagtctccgatcacatcattggcaatctctctgttcgaaaaacttcagttcgctctggaaatcacatcatgtctgcgggtgacactgccagagagcctgcgtctgagcaaacaccgctccttcgtgattcacccaatagcgatgccaatgagaataccccactacaccaggaacccagtaccaaggagctgatttggatcctcggaagcatttggctcggtgtcttcctagctgctctcggtatggacttcaactttttcaggagtatcataatgactgactttggctcattgcagatacaacaatcgttgccacgctttccgcgcctatctcttcgtccttcaactcattctcgttgctctcgtggctagccacttcttatttgatctccaatgccgcctgccagcctctcagtggccgattgactgatatttactctcgtcggtgggggcttgtgttctctaacgtcttcttcgcccttggcaacttgatctgcggcctggcaagagcacaatgggttatcattttcggtcgcgtcgtagcaggtgtcggaggaggcggtcttactgcgatctcgaccttcgtcacttctgacctagtccctctccgtaagcgaggcatatggcagggcattggaaacatctgctacggtgctggtatgggacttggaggtgtgtttggcgggtggatcaacgatactctgggatggagatgggcgtttttgcttcaggttcccttcctgatcatctcatgcatcttagtggcggttaaagtcaagattcccgtgaaggagtcggataccgcgcgcatcaaacgcgttgacttcctcggcgctatcactctagttctgacattggtcacattattgcttggcctcaacacgggcggaaaccaagtaccgtggacccacccactggtactgacatcgctggttgcctccgctgtcttcctgggtctgttcatctatgtggaagctgtggttgcttctgagcctgtcattcccgtgcgccttttgctgaaccgcaccgtggcagctgcttgtctgaccaactggttcggtaccatggccatcttcggcctcctcttttatctaccggtgtacttccaggtgcagggactttccccgactgctgcgggtgcgcgattaattccgcaggcggtcggcacctcgatcggctctttggggtcgggtatcatcatgcgcgccagcggtcgatatgcatctcttaattatgttgccatggctgtccaggttctctccgctgggctcatctgcactttgaatctccacacgcctgtgggattgccgttcctctatttcttcctaggcggagcatcctatggtagcatgctaaccatcaccctggtggcgctcatctctgctgtagaccaccaacaccatgcggtggtgacatctgcttcgtatgccttccgtagcacgggaagtacgattggtatcacggtcgcttcggctgtcttccagaacaccctaaggctcgggctgtggtctcgattgggtgagcgcaaggacgccaaggagctgattgaacggcttcgtgacagcttggacgaaatttggaagctgcccgcagatttgacatccggggttcttgacgcatacatggactccttgcgcgcggtgttcgtgacattgttgggcctggccgtcctgggagcattgaccagtctggctatgagggagcacaaactgcacaacaacctagcccgacgatagagtaggtattcattcgggcatttaaagaaaaaatgttcgagtattatattagatcagctgccatcagcatatatagggttgcggtgtcggggttcgcaacaacccagcagtcaacgtacaggaatagatcaatagagagacacatgaaacaagtattggaagttgtactccgtcctgaagttgtatgtaaagcacatgttggatgatctcaggcattgaccgcttcggcccaacaactcgccaatcaatctcagcttctcctgtacggccccatttttaaccgccattgaccccgaagcagcattttggctctttgcgattggccgatcgtttccctcgaacgaatctcggcattttttcgccgtgcaataacacggttcactcggtagctcatcgcatcgggtgtgtggcaaagacgtggcgagaccatccagacaacgcaacgacctcaccgctcgaggacaccagttgatcgtcgttgcacagaataaagcgccagtctcgatttcaatcctgggttgcatgattggacttgatcagaccaccagtccgataccttatctctttgtacagtctgagagtccccaatcgatctcgttttatcgcctctcggcttcgattcttctctactatttgcgcctacctatacctttcctgcgaaaaagaagtctgtttcttccctccggcttacctccttatccctaaacacttcagtccgccttattggtcacattggcatggcagttggatttcgagtgaataattcaccaattacgaaaggcaagggcattacaaaggggtcgtggtcaagtgatatggaggtggatggacgctataagggaaccgtgattggaaacaaagcggtggaaaatgcgacatcatcccatcctcggcgccgccgattgcttttgtcgacggatagcgctttcgccgacatcgtcctcccgtccctcgttcagaacccatacatcgagctgcgactgatcacagacgaaccatcggctttgctcacgggcaccaacaagatcccgcactacatggatatggtcgacagtcaaacattcgataagaaaaccggcgcgcggaaatggctcaaggcgaagacggcggagctatgcgaatgggcggatatgctcttggttgcgcccatcgatgctggagctctgggcgcgatgctggctggcttgactaataccctgacgttggcgctccttcgtggctgggtcttgaagaaacccgtgatcctcatcccaggaatgacggtgtcagaatgggaccacccgctcagcagtcgccaactcgacgaaatcagtcgtttttggccttggattcgcactatcaagcctgtgctgtggaagtcaaacgggcccgaagacctgacaatactgccatgggacggcctaaaggagttacaacaaacactagagacaacactaaaactaccgccgtgggaagctacccttttgaccagagcaatcccgcatggtgcagcggtcccggctaaggctgcaaaatctatatctggaggtgctaccggctccacgccacaaacggaacattcggggaaggccgatttcttaccactggaaatctggctaaatgtctttgaggatcaactgcaggactgggaaacagcgaaagctgtgggcattccaactcatcttcctgttccccaagaatggcagagccatctacccaaaatgtccactacggccacactcgaatacactatcttgcgaggatctttcgctgcgatcaaaaagcgcattgatgcgctgcctcgctggaaaccgctctccgacctcgcttgccacctcatcgtcaaattctcccgcaccgacatactttcctatctcacagaaaaccacctggaccttctctggacaacctcccgactcacaaatattccttaccgggcatccgcaatctacggcaacccgaaagtactgacatggtggcgcgatgcgccagctctccccaacaaagagtacatggccgacgccatggacggcgcctcacgagcaggatttatcgacgtcctggattggtggctacactcagggcttccgctaagatacagcgaacgtgctctcgaagctgccagcgccgaaggtcgagtccccgtacttgactggtggaaagccgcctccgccaacgccccactgtccaaccccttacctctcaaagtcggcaaatccgtcctactcgcagcgcagtcgggccgcatcgcatctattgcttggtgggacgcgtcggggattccttacagccacaccgagaacattgcgcgcatcgcgagcacgcacggccatgttcatgtcctcgagttctggtataaactcaagggcccaaagatgatctttgataaccaggtgcttgtgggccccacgaagaatggccatgacaacgttctacagtggtggaaagactgcggtatgcgggttgaattcaaaacttgtgacattgaagaagcgcttgaagatgcggatccgagctctggcgctgaggatcgtgttcggcgttggtgggagcggaacggactgaaccttggagttggcacgagtgagtggatgagatcgaaggttctgtgagacttcattttgcatcactgcatggcttgcgctttcggtcttttggcgtcttgggaagggattcatatctcctcttctgttcctgcggttgcgttttgttctttttcatatcatgactccagatgatgacgacgtataatacccatttgaatgttcacaattttcacaattttcatcgcgcggtagagcttcgagtttgttcagaagctctacaagtaatatatattgtctgtgtttaaattgaatctacctcttacatatcttttccatggggcgatagaactcattctcatttttcaatctagaatcaattataatctacaataattcatgtgaattgactgcaaagacctgcttcatatttactttatattcagcttcaacttcttgagacccgggaatgctcccgggccatagttgctgagtcaaggcccagctcgccgccgcggctccaccagtaaatcgcaaacatccagcaacctccaacctaaccaataaattgacaatcaattttgctgatgttggcaagctgcgtcctgcgacgcgtgctgcgtgcttcatgcccaagggcaatattaacccgcacgcgaaaagcatcatcaagtccttataacaacatcccgtcaaatggcatcaacggcctccacaacattacaagaaagagacagagcgccgctcaagatatccgaccaaataaaccgcgcagtctaatcacggccgctattccaagctttgctgtaccacctctcatgttcatcgggctcctactcggtctgtggacttggaaatgcttctggattattgtcatgcaaaacaagctcctctacctctcctggttacctccattcacaagatcagagtctatttcagattacaaagctgagtgcagaccggtactgtgggaggaaaagcagattcgcagtttggatgggaccaaattggctgtttgtgagggtcacattccggttcctcccagggaccgtgagtctgttttgaatactgttgcttcacaaaatacacaccaggggaaactgatcccgaaacggaaaaattccgttgtgatctgttacttccaaggcaatggcggatcgacccctatgcggttgcctcttctctctcatgtcttgcgcgcaattgcggaaacgtctagatcggatccatctcctatgtctaactccaaaatctccccatatactattgctgccctgtcataccgcgggtactggacatcatccggccgcgccacacagtccggtattgagatggatgcccaggcactcttgaattgggtttcagaaacatatgcgtccccagaaactgatcttgaaattgtaatttggggacacagtctgggtgctgctgttgcaacctcagcagtatctacgtatattgcccgccaatgtgagggcaaagcctcaaatacaggcagcaacaggcccctggcgcctatttctgggctcattttggaggcgccgacatccagcgtgaaagatatgctcatcagcctctatcctcagagatggcttccgtacagatatctttggccgttctcttggaatacctgggatatcaaggcgaagatgcagcaaatggctacttggagagaccaaccggggtctcaagtcttgaatgaagctacgacatcaataccccgctcgcttccgccaatttttcttctggctgccgagaaagatgaagtcattccatcatacgtaccaggccagttagaacaacatgccaaatctctcggcttggagattgagaggaaagatgttatgggtgctatgcatatagaggcaccactcaaactggatggtaggaaagcaatggtgaaattcatcctaaacgtcacatccgtgcctagaacataacataataacctcacgagagatacaatatagacgattgaaagtatatagtaccttactcccacttctcaacacgtacgtgcttaatatccgcatccttcataagcgccttaatcttctcaaactccttagaagcctcagactccccgaaagcaaaatgatcctggacctggttccacccgctaaaaagaacaaactcctcatcttcgccctctttgtcaatgcgccacgcaccgcaggaagaaaacggagccgtgtaggcattcaaatgggacacgccattcctgaaaacagcgtcaaactcgcctttcttgcttggctcgacaaagtatcgagttatagcgagaacgggtgcatctaacgggattttggatgtaggtggctggatccgttagcctatatttcttggtaacacccttgacctacgaaattagttcatcgtcaggatcgaagagctcacatcgaggtccaagtgaaacatccagctaacatcaagactgtccttcaactgcgcgagcagggcctggttgatttcaaatgaaagccactggccttcgcctgtatgtttctctacagactcccacccacccatcaggtagacggatgatgggtcttcgatctggcggaggtatgtgacatgatagccggagtgtgttgattgtttctcttgggcttctatgaaagtactcttggcggaagacgaggggtcttgcgcttttaggcggaggagggcgagttcggtcaccggcatttttatcttctctttgaatatatggcctgtgttttggagggattgtttagtttgacctcgattactggggattggacgttgttttatatgtctgtctactgagctagggtggggggcgctttgtaggcagctgttagaggcgtcatctagctaattctcggacccatttgactaatcggggattattcaatgtggttcgctggttttatcactagtggatgtctctggatgtgtgactttatggctacaagctaagggtttcttttaaaaagtcagtatatatctttgccacagaatttggaaaaagggtaaacgaaattgcaatgcgatcattcaaggatatacacgtccgagacaccagcgatcaaaataaatgttaacccttcagcacacgataaccaatgactttgggtataccgatcaagcaaaagactagacaatgtacgaaagaaacgaaaatcgcaaactgcaaagtaaagatcatccgaacttgcgcattggaaccatatggatcagacctctttcctgtaggggcattaataacatgaggtgtaatagagagaaaaaatgacgtaccaagtgagtccagctttctcgatgcccggggtcttaatagcattcctgtccccaaagggattgtcttcatcgtcttcttcttctggctcactctcgctctcaaagattggacgtgtgtgttttgacgaatatgcaagaggcaggctatcagggcgattcggccgaggtggctttcgggggttgatattaagcccggcaaggccgtcattcatgtccgtgtcttgcagaccaagtccatgtctttgcttccaattgccttccaaaatgtcatcctcactatcactgtcataatccacgctcttgtcgagcacctcgaatgccatcaatgcatccaccagctcctcatttgcatggatcaggccgcctaggaactcttcggtttctatatactggatatatcgaaggatgctatgacgaagctgcttgcaagtatcgaatcggttaatgcactccgcatcctcacccactcggtgggtctcgcgattgacgtgtttaagggcattcaacaggttggtgctagcgacggaagaggcagcaagggtttgcaagatctccgggcgctccttttccatatcaaatctcctgtggctaattgataatttcttatctttcttgactttcctggacttggatttctctttgggactggtcagcacagtggatggcccactgcccgctgacacggatacaacatgacccatcgggggctcgtttgaattcgaactcgacccctcgcggagaaccttggctttcgcctgtgtggcaggctgctttttgggaacttgcttgtatagcgccgtgacccttgccatgccaggggtgtccttataagttgtcgcccattgtccaaaaatctgtttacatttctgcttcacgagtggatccgaaacggaatcagtagctgcgatccgcagacgttcgagcaatgcctcatcggcgaaatcacgcaagaagcgttctcctgcattttggacgaggaagtcgagaatagtaagcgcgcgcagttgtcgatggatattgccatattttctgaactggtcagactgattctcagcactttcaatactcatggacttacagtttcttgcgaagagcccgacttgcttccatcgggccgctggcctggatgcgaactacttccactaaatcgacaataccgctggagtcttcgacttcatattgctcgctcgtaaggacctcaatctgtacggtcactgccgagtacggtttctaacagctatatcagtcggtgctggaaggatgtatggtcttcacccgatgactcacggaggattgaaacattctgccctagccaaggtgatggtttcgaaaactgtatacttgttttgagtaggagcaggtctgggaatggaaaatggtccctggtatcaaaagccaatagtcaaccccacgctgcgatgtcggtatataaatgaccccgcacggcgctgtttacaccaacgcttcacaggaagcgggtatgtatggggctttcgacggtgataggaagcaacttgattcgctagaaaaataccggaaagggatcaacggtgtgaaacacaaaataagggttcaagaagctttcgcgataccttcacgtggtgtacgtggtgtacgtgttgtaggtgacgtcggaggccccaggggggtctcggcgcccgttaatatgataagcgcaatggaactaccgcaaaaatgtaaagaatgttttggtgtttctcagtttgtccaacagggcatccaaattgcaaaatggccttgttacaggggaagaggggagatcaaacaatgctgagacagtttaagcttatcggctggccaaaaggggattagggcggggtctcatgcctgaggccaaatttatgagaaagaagtcattgacgactttaaaagaccagcaataaccaataagacctcgagaaagaaagaatagtcaatcctgactacatttcttgtcaattaatcttgaatgaagctctcatctgcacaccggacggacccatcccaacgctcatatttcttacgcgtactgtcccgcttcgtggtctgctccacccttattctggccgtcagcgtggctctgaaatcccgctctcgtctctccctcctcctcccccacctctcctacaaccaacctacaatcatgtcttaccaacaggaacgttacattgccgaattggccgtccagagggcgtgtctcctgacacagaaggtattcttcgagaaggccaagggcacaatttccaaggacgacaagtctcccgtcaccattggcgacttcggcgctcaggccctgatcatctcggctctccggaagaatttccctaatgacgagatcgttgccgaggaggaggcgagcactctgcgtgcggacaaagagctcagcgctgagatctggcgcttggtcaaggacacccatctggaggatgcggagagcgagaatattctgggtggacctctcaccagtgagcagagcatgctggacatcatcgatagcggcaacagtgccggtggtcctaagggtcgcatctgggctctcgatcccatcgacggcaccaagggtttcctccgtggcggccagtacgctgtgtgtcttggtctgatagttgatggtgacgtcaaggtcggtgccattggtactccgaacctccccgtcgatggttctgcccccattgctgccagcaccggtgatcagcattccaaggctgccggaaacggtgtcctgttctctgctatcctgggcgcgggtgccatcagccgtcccctggccagtggtcctcttgctgccagcaagcccatctccatgcgctccgtcgcgaacatatccgacgctgttttctgtgaaggtgttgaggctgcgcactccgcccagggtgacaacgctgccgttgctcagcttcttggaatcaccgccccgagtgtgcgactggactcgcaggccaagtactgctctattgcccgtggtgccggtgacgtctacctgcgtctccccgcgaagaaggactaccaggagaagatctgggatcacgccgctggtgatctaattgtgcgtgaggctggtggccaggtgactgacatgcacggcaaccggttggatttcagcaagggccggaccttggctgtcaacaagggtgtcgttgccgcccccaaggcccaccaggaacaggtcattaatgccgtcaagaccgttctgaagctgtgattggtttatatattttttaatttgttgcctcttccgctacacttgagctcctggggagcgggatcagtttgaagtagatttgtgataccatcgcttgaataaaaaaatacatatgtgacgataagagtacaaaacacggaaccaaacacaatgtcccgcgtagctgaaaagaaaggcgcctcccgtctatttgatcttcttcgccttgagcttgatagtctctccgttgacgaagatacccttgcccttgtacggctcgggccgtctccattctctgatttcagccgcgaattgggtcacaacccgcttgtcgacaccctccaataggattctggtgggctgtggtgtgctagccacaacgcccttgggaatacccagttcaatggggtgggagaagcccaccttgagggaaacgaatttttggccggggtaggcggcttggacggtggatgccttatcctcgatggtcgccctgtaaccgacaccaaccatactcaagacacagacgtggccttcggagacgccgaggatgtgattctggaggagtgcccgaatagttcctagacagaaaagcaaagtgttagacattgataagttgccgtgcggactggaccgccgcggagaaaagacaggaaaacataccccacatagcacgctggtgagggacagtctgatccaagactgacaaactagccttctgacctgtctcgtcgggggtgatagtgagaaatgagggaatgctcaggctcatctcgcctgtgaatcgggcgagttagcatccatcggcgggaccattaagcaataacacattacccttaggacccttgatctcagcaatgaacttggggatatcctttcctcgcgtccgggtgagagtcgcggggatatcgatgagcttgaatgacacctccggggggatggagagcgcggcacctccgattcgggactgcgccggggatgtggtcgagaagcattgtgtgcggggggagaatgcgggcgcgaggaagatgggtagggagccgcgctggaaaggctctcgaagaagctggcgggcgcagcgttggggtatggagcacgacatggtgacttgcgcgtgtttggtcggatgctgcgttgcggactttggattttgttcgaagatgggttacctcaatgggtttagcgtgcacgtgattatctatatgatttcttctttttatcaggttagaatatcatgatctaaaggtaattatgctctcgactacaggaatcaaatattgggcttgattgcttcgggaaatacgcttgatatttggtatttctcatttgatgcagaggttgttgaaacctagtgcctaacaacatccgagaagcgacacaatttgtcccaattgaaattgattccttcacataccgacattcttcgagatgcaacatctctgtcgaggcctaacacagccgagactctacatcccgtagtagctgtgtacaaaaggcatagtgagattgccaccgactagatctccaacgctacacatgcatagaactgtcatatgtacgggcttttcatcgctattcatatctaacacagactaaaagtacggaggcataagcagccaattttcttgtcacatcatcgttatacaccagccgggctagtgttagtctcgggaatattctcggtttatacgacagttcgctaaactgccctctgactcctgaccgtatattaacgatcgcattagtattcggatggaaatttcttctttatggacaagtaactaaatggtgggaggaaactattcaggaaaaagtaaagcgagagttgggcttgagctaaaacaacttgaatgtcaagtctcactttcgaaatcatccttcatcctcatccatttcttcccatcctacaccactcttctccctacctttatacccattcatctcagacaatatacacgagtgatcaaggaccagggcccgtccaaagctacacacactcgtagaagcagccataccattcactatgagggcaaccgatcgcttccaagtgattgcatatatcttcctggcacttacacacctcggtcgagcaagtgtctcccaacacagtaagccactcagatacgtctcaaatcattttactgacataagaagatgtcccaattcttgcaaccagaccaccggacatcgacacggtctctttcctcagttcccgggcgcaagaccaagacagcatcttcaacgaagccgtcaaaatcctggactcgatgcaatcttcaccctcgtgcaaccggcttgcagcgacaaaactagtgaactcgtgccaaacattcagcgatggcaaggacggcacgcagacggataacccagagactctcgacgttctacgatccgtctatgcagtacgcctggcattgtgtgagatcgacggtgctggtacccaaatgcctccctcgtgcctccctgttactgtctcgccacctccacagaagaatcgatttggctttgtgagtcgacacagaggccccgaccccatgtcggatgaagttccaaaagaattattggagcaatgtctgaggacacttgagtcacgaccccagtggtggacctcttacagcaacagccgacagaatgctcttgtgatctgccatgcctcgcgaatcgagacggagaaagaggagcttattgagcttcaacgatccattgccaagagcagtctcaagctcaacaatgggcttcaagaggcgttgcgaaatgcaattgcacagtctgcgcagcagcaatcattcatacatgctcttcagtctctgcaagggaagatcgtgaccgatatggaagcgacagactctgtgttcaaacgaacattcggcaaattccttcgagaaatcgaagctggaatctggtcgctgcaagattctatatctgaggctttgtcgaatgtgcgggctggaactggggtcctcgaaggggtacaattcgagcagctgaatgagttgaaacatgtactaaaatttcaaccaggatatccggaacgtatctactcaagttggagcacttcaacaggctctacggagtgcacatcaagatgcaatgactagaagccgagagacgttgctagctcaagaaaccaatgttgtcgcccagaagaatctcgcatcatctttacacctgtcgctcgagtcacttctggactcagacatggacaaactgtaccaaggcatgcagagattcgatgctgctatggtgtgtgaaatatacatttaccatgtagtgacactatgagactaatctcttgcccctttttgtaggaatggttggccagccggatgaacatgattcttgagcaagaaaccaggatgacagaggtacgagtacattcctacataccggctttctcactgactttgaaagcgacttcaaaacatggaaacctttatacaaagatccgaatcgaaggcaagcgagctacaaaaggcgcaggaccaacaaacagaagcactatctgcccaatcgcgggcccaggaggccattcaattcgatgcgcaagtgtcgcaagctttgctggccaaaactagtgttgctgctgccaatttacaatccgtcatcgacgatgcagcgttaaagttcaagcatgtcccgggtttcggcattgggggatcctcggcatggtctatctgcgccgtcctactcatcgtccttgccgcccagaaccttaagattgcaattgctttaatttttctcattttgggtaggtgtgttcttcatgatcaagagtgattggtgctaatataaggaggattaggccattctgttgcccttattatcttcaaatttctctagttatacacacgctgcgcaatgatttgcggaccagataccattgataccccagctttatttctttttttcttctattttcgctcctatctctaccatctttgcttgcagcacatcccctatggtcgttcattgcctctagatctatagcaatggaataattcagtcttcttcatttgatagacggagtacggagactcggaggagctatgtatccccccttttcgctaattatatgaaactaaatagacggattgtttcagaaaaaaataaaatgaaagtgcaaattagcgctggcacagccacaatcactagagctgccagaggataagcagcgggatatgacccatttacatcgcagtcagccaatgaaagcgcgttctcgacacagtggaaacaacgcacgagaaaggcaattccccaaaataacaaaaacggcaagtcaataggcatagatgggggcagtcacgtgggagtaaacagatcgactgcgcgcttctcctccttttcgattcgcaacacgttcctcatcgggtcttgattcacatttatcaaatatctgtctcatccaatctcaaacgcgttgatcaaaatgcctggtgttcgtgagtgaccataactacctcctatacttcccgacccaacatttggcgcccgtcggaaccgcaagtaaacagcgctaacgttctccagcacccgacgctcttcagcaggtcaagaagggcttcaagcggttcttcagcctccgcaagaagtccgctaagaagcagaaggccgagcctgtccaggctgcccctgctgagactgctgcgactgctgcccctgtcgccgccgttccgaccactgagacagctgccgagaaacccaccgcccccgctgccgccccggaatctgccccaggtatgacattctatcagtttgatatcaccttcgtctcgcttttggctcccaactaacttattgacctactctagatgctgccaaggtgcccgaggtaaaggatgcaagcaccgcggagcctgtcgcctcccctgagatgaccgctactgccggccccatcgagactcagtacgagcctgagactgctgctgctgcccccggccctgctgtgcagtccgatgcccctgctgctaagcctgaggagtctgtcgctaagcctgaggagtctgtcgctaagcctgaggagcctgtcgctaagcctgaggagcctgtcgctaagcctgaggagcctgtcgctaagcctgaggagcctgtcgctaaccccgaggccactgctgctaaggtcgaagagtccgctgctaaacccgaggccactactgctgcgcctgtggagcctgccgccaagaccggttagtcaaattgtcttcacgatgcagagaataatgctaataccgatgttagatgcgcccgctaactagaagtgtgtatatccacttcattggccagaatggacctttcttcgcgaatctgatctaacttgcgagtgcttttttcctgctccctgtttcgtttcataccctcagcgttgtgtattaatcactttcagaaagcgatgcgttgcatgctgtttttcttttcttccatatcggcctcgatcagaccgcttaatatcatgcaaagctctactcattcattccagaatcattacgcgacagtaaaacccccgccttaatctggtatattatgctactaatgctgacagcagagaagaaaaaaccaactcgcccacgggtatcacattaagaatctatgctaatgctgaacagtttcattcattcccgtctgaggaatgatcatcaccatcagccatagcgacatcttcaacactgacacccgccgctgcagccttcagctctctcgctttttgtctgcgcttgagtttcctatcgcggttcttccgagtccgcttctctgcttcattttccttggcagcctgtgcggccgcaacgcgcttacgtagctgcactcgtcgcttcttgcctggcttcttgcgtgtaagtggactcttagagacgggtgcgccctctaccacgtagactggaagactgttggctggccgtggcattttcgtctgatgtcgtttgagatggataactcgccaggggagatggcagccgggctagaaattaagttagcagctagacaatttgccagacgggtatggatttccttacccagactaaggaattggcccatgtcagcatgtgctgcccgctaacggccacgtcctcaaattgtttcttcttttccgctatccggctttcgtcttcggtggtaggttccccgttcctcgtgccttgaagagaaggtgtcgagaagtaataatcccacccacggaaggctttcacaaatcgtccctcagtgctagcgccagatccgggtgtaggtgaatgcaaccgaatcctcaatttttggattgtgggggcctctgcggcctctgcggttttctcatctgtatccttttctgactgctcggtggtatctttcgttgatttggcaggggcgctgaatagccggaactcgaattcttgttcctcgtcttcattatccgccgcttgcgagggatcattctcttggctagctgtctgctgtgcagtatccagttgatttaaattgagtagctttccaaggcgggcgtatgcatcctgggcggcgtcgtcgtctggtgctggtgattgtgagcgggatgacgctggagagcgcatctcatcgcggcggacgctatataagccggattagccgctaattatatcgaaaaaaaccagggtggattgtttgctcacgtaccgcttagcatttggtagatcgaacattgtgtggtgtgtgtggagaggaataagactaaaatcccgaatcgagaaaagcgatgtttcacgccgctctacggccacggcctgatgacatggcacggaccgcccagcctcacggccctcaccttccgactttgaaggccttttgtctacattgtgactctctactgcgccatttgtttcgtttcatattctctgttttctgcatattccacactccttaccttccgatcattccctcgctggctccgacaaagggtacctgcaccttatctattgggttggttgacgcctcgtgcccatcgcatagcgcaaacgtgcagccaagaacatcccccgattctagtactcgatctcaatcctcataaatgggtatctgtgcctcctgcctcggcgggaatcgccacgactctcctgaggtgagtctaaatccgaagctagtctctttcccgttaccatgttcatcgcgcattacctcggtctgatgcgcgatgcgtgggggttctagtcgcagagtgcaattgtctaacatttctttcttcaagcctgaatctgaacgtctactcgatgatgatccttatcaggccgggtatggctacggagcactcaaccatgctcatcaggctagccagccagattcggaatatgtgaggcgtgagagggaggcgctggaatcaatctgccagcggacatctgagtgagtatactgtcctagttgccttctgttcatatggagttgaattcatgctaatcgtgtcccttagctctgtcatcgatatctggtccatccaaccacaaccacaccttcgaccccaagcaactctccacacccctatctctgcatctcccgtcccatcacaaaggaccgatacaacaacacctgtggtatctacgcaccatacatcaccgccaagccgtcccacctctggctcgtcaggcaccgtcccgaaacactggggtgaagttgtcgtgaacccgaacaagaaacgatctcgtaccaatatcaaaacggattccaaagccagccatgatgtttttggggttctcaacgtcacctaatatgatgcgtttggggcatgcatcgctgcacattgacgatgacgatgtacacgacaaacgagggtgtgggctggtgaaaataaaatcgaggatgcagttgagggtactggaagaccgtttcattattttcttgcgccatgctgttatttttgggggttttttgtttcttgcattgatcgcaggtcgactgtctttcgcacatagccattcattcctctctcttcctggcctgataatacccattggcgcagactctttcttttgttatcagattcttttctgtaccccatgttggcttcttttatgttggcgtgtttttttatttgctgagtttgtttctttgtcttcatatcatcttgttcgtcgtgcactgcttgtatatgtagttctcttttgagtgccggactttattctttctgaattgacacacaatttggattatgtcaagtgagtctcaggaaatctggataatgtacgtagacttctagaatctcaacccatatagtagttcagcttgaggtgggatggctttttatatagaaagtatttcagtttactatacaattgagatatcatgggaaattataaagaacttcactccccatacttatgagagatcggcatcaattattcaacctgtgactccgccgataatgatcgtaaatgctggactgaatgccaatgacaagggggaaaacaaaaatgggattgacagggaaaagaaaatggatacatgacaactcccctatgacagaagaaaaagaaaacgcccgctgatatccagggatggacatagaagagagtaggatgatgcaatatgttcgtgccgggttgatcctaaacctgacggaaatgtcaaactgcagaccattagacatcgtccattgtacccgcaggctcttcaccaccagactcgtagctccccgccgagctgagctcatcttcagactcggtgtcctcgcctgcttcatccacagcctctttgctggcgtacttgtcaacatattctaggagcgagcggtcagtatggtataatagcaaacataagcctttgggttgtaacacacctttcacctttgcctcatatgccttgggttctctcatcatcagcgcagctgcttccccgttgagaggatccgaagggttgggatagcggaggagctggggaaggaagacctcgaagatgttgagcatgtcatacatcggcgaccaggtttggttgatcacatcgagacagactgagcccgaactatagcagaagaatcgcattaacctcaagagtttcatttccacacatgtcagaccacgcttgactcacagctcatcgatgtttgggtggaagattcggttgacgaatccgatgctcgggcttttgtatgggtactgatcaggtaattcgacgtgaattttccaaaggcctccggtaaatggtgctagaaaggttagtatgatctaatactggtcgattatgaatgagacatactctcttccgggcccttgaaacgaacgtaaaattcttgcctgttgcgagtagttggtatcggagagcttcaaatggttgattgtggtgtgttaggtacatacactggagtccggagttagtatagatctatagctgacagagggccagaacttactgttgtcattgaccagtgtcacctcatagtcactcatgagcctagattaaccgttagtatatttcccgtcaaccaagtatgcttgccgagaccgatcaaaaacgttcggagaagcggcggcgaatttgaaagggtagggagttgtcggtcgtacatcctagcgagaatgttagtgccgtgtattttgaacatttctgaacttctagagcatacttcatgacctatatgatgaacaaaaaagagttattagcatctccggcgactctgggggcttatcggacgatccgcaacattactcacatctgtctcgattctgcgctttgggctactcatgttggtggtttgaatgaaggagtattttcgatctcgaaggtattatcagctgcaggctctcacagaaaaaaataggcccagcggtgtcaaatgccgtgattcgcaagcagacccggaggcggagcggggaagtaatgggcggggcagacgatggcctttgaaatagatgttaagtaattcaggggtcggtgattaagtagaagcaaagtgagagggataacagatatcagagaaggcttcacttctcccgagcgaaggaaatagaaagaagagacgagaatgaggtcttggatgaatgatccattagatcgggcccgcggacagtggacctgcccgtgtgatgagtcgatgagtcagcgcctgccggggcccggcgccatgacgatgacttgggataggtcgatacacttctacggtatataattgagaacataattggttcatctttccatgatagtattgtagggttgtgttgctgtaggcatctatatcgtgctacatgaatggttgaactttagttatacctctgtgagtaattctcgcggccattctatagttacactctttgaatagtgtttccgacacacatgcacaaaaaagaaagagacatgcgccctgtacgtcctatatgttgtagaaagtgtggatcagatgtcatccatagctagccatgtactccctactaataggatacttagaacaagaggcactgcggctaccattacagaagaaatccttctgggagagtaaatagcattttctttcgattgtctaaagctctttttttttctgatcagaaattaagcaaaactgggtcatactctgttacctaggtccctccagttaggttaggatgggtcacgtggctgcctcagctacagcatagtatcatctctttcagctatcagtgcaacaatttttggtcatgtttctttcttatgtctatgattacaggtttgaattctagcatacaatgttatcggtgagctgtatgtttggatatgactgtagtatgtcggctttgaaaaagaaaaagaaagtgtaggtaactattgcatgtctcctcctgaatcctatgattgggaataaaaggggcatatataaaaatcgtgggacaagatgatacactcagtgagcaggaccatatacatcaacgttcttctgaccaaagtgctaccactcatccactttttaccatggccaccgaccctttgaaatataatggaccaaatcaaatccgaccctatctgatgaacgtcttgatgatgaaacatagaaattgaaaagtcacacgaatttgtgtcgggtgaaatgtctagggaggtaaagggtaaagaggcacgatatacagctcgaaggcatatctggactttatataggcgcaagctcagaataattatagcctcgatatttcattgtagatctttgacggaagaagtcagtataaatcaaaatatcatatggaaaatcttcaatcaatttgagtgacgtgcgaaatactgcgctcagcttcttcttacgtatctagttgtataaattctgaagtcaaggggagaaggtgatcacaaaccactatgcgctgatatctaatgaagtagtagttgtttgtttatatataaacagcatagtcagccctcgagccattcccattcatatgccgctatatatcgcgatatgggacttgaacaattctgatattcaatttgcaaggatatgagaagcatttcaatcgaatctcaactacgatatattctataaatgtctttgtgataaccagtggtaaaccgtagaattcggtgacgagcataattgctataaaccaatgtattcatgcatgtgtgttctctagcggtgtaaatgtgtatgtgttgttagctagacttccctgataaaagcccaactgtagcagcttaactcgcagcaagtatcctcctcttcgcaaatcagatactagtgatcatgtttacgtctgctacgggtgcctaattaagaccgggcccgcaggaacccgctgtacgggaagaaagcgattggttggaaagtggaaatagtggggctgttgcctaaggttgcctaaggatgcctggacgctaacgctaagtggatgtcaacgatatgaacctaaacattcgaatgttggcttcctctttatttaagacttcgtctccccattttgccagttgatatatccttacgcactctgattaaatttgcaccattctcaacatggcttctttgcccaccctcccagtgaagcacaatgacttcgtgaagtatgtcaacgccaacttggagaagcccatggtggacttggttcagccatataacgagtttgacgccgttctgcgaaagaaattcgcccaagacccctctcatccatcaattcaagataactatgccaacattgtaccgctgtatggccagaccggttccacaaatatttccattcgagctcgagaccttgtctcagaaacgccagagcaaacggagaagtacattttgcccttgagtgcaaaagaccggaaaccacatggttctgcggcagttgtaccctctttgaatgagttcaagaacaactttgcgctctttacagagggctcattgagtgaaattgactggtctaacgtggtcgctgctggtagcgctgtcgtcacctcacttttgcctgtaccagaaaaatatcgcaactcaaagcgtggccttcgcaagtactaccatgaggagtttgctccagcgtcagatgtggatctcttcttgtatggcctgaatgaggaccaagcgattgagaagatcatgcacatcgaggataagatcaagaatactatcctctatgagaccacgaccattcggacgaagaatacgattaccattgcttctcagtatccgaaccgccatgtgcaaatcgtgcttcgcatctaccgctcaatcgctgagatcctcactggcttcgacgttgatgcttcgtgcgcggcttttgatggtcgccaggtctatgcctctccacgtgcaatcgctgcatacatcactcaagtgaatcggattgatctaactcgaagatcaccatcatatgagaatcggctctccaagtattcacatcgaggatttgaggtcttctggcctgctcttgatagatcgaagattgacccggtgagaattgaatcccttggacgagagggatgaaatgtccgaactaatttttgagatagactatcttcgagagaagttttaccagaactgaaggacttgcacggctcctggtattggaaaagcttcctcggtctcacgaccgggacaactacctccaaaagaggcgtgaggaacgaggtcgtcctcctttgagtttgtacctgaaacgtcgtcagggtaaaatgctgcatggtaatatcaaggatgactgggaggatgaggtgcccgaatggcaagagcaagaccaagtgtccgattaccatacttttgttcgtatcttcaccacaaccgagcttactcccattcgactatcactgaccctctgatagactattccttacggtcggagattcaacgccaggaatatcgagaagctactttacaccaaggatctgttgctgaacgcccaatggaatcagcccaaagaccgcacagtttatcttcatcgtcatccagcattcttcggcgaggcggaatatgttattggcgactgctgtggctactgtcccaagcctgtcaccgaggaggaagtcaaggtcgctgatgaggagggcaagatttatatctttggtcatatcactttcatcaaagatgatcctggccgccaggaaattggaagtttcaatccgatcactgaaaccgattggactggtgagtgaattgtccgaaatgtttctttctttctgaattatgcactaataccaatatccaacattgtagaaatggcttatgttggccgcaccgagaaactttgccaggcaatcttggcaaacgatgttgactccgtgaaagctttccttgcggatgagggtaccgatccagaccgtcgtgactacactggacggacaccgctccaactcgcgtgcatatgctcgacccctgaagtggttcaatgccttgtcgacggcggtgctcgcatgattccccgtatggctgatggaaatacagcgctccatcttgccgccgcccggggagacgtcgacatgattcgaatcttactcacaaagagcaatgagaatgaagaagaagaagccaagaagcaggattctctgaaacataaaggagagtcaaagaccaagcccagcacagacgaggatgaagatatcgatatgattgaccaagacgatgccatgtctcacacctctgcctcttacgtcaaagtcgaaagcgacgaaaagaatttgaacgtgtatgatacgctccaggagaatgacctcgagccggatgtctacgacattaatgtcgttgcatgggatagtcggactgctcctttgcatctcgctattctacatggtcatactgaggccgtgagagagcttgttacatccttcggtgccgatgtcttgatgccaattaaaatcctgaatgagcgcgacaaaacaccccaggctgcaattcttaacctggttcttgttcaagtccttccattcgaaaaagcaatggagatgtcgcagacccttcttgagctcggcgcttcaccagcgcaagcagacctcaagcagaagacaccgctacactaccttgctcaatccgacaaatttggaatttttgatatatacgtgcaacatgatgagccagcagtaaagcgcgccatcaatcacttagcagttcagggccattcctacacaccagaattctcctcggcgttgatgtttgctctcactgcgcagaacgcactcgcggcagccaagctgttggatacaggggcctacccgaagattgatcccgcagaggttatgaaggctattacgatatctagaggacgcaggacctactacggcgtcaccgaagaaaacgcaaagtattgtgtgaagcagccaatcttgctggctattgagaatgacctccctttactcgccattgatctgcttcatcgcggggtaaatcctaacaccgatatcagcgaaagatatcgaaaccaggatcggacggtattggacgtcgtgcgccaaactttgcgtgaccttcgtgaattcttggttgtgcgcaagtaccaaacctatgctaattccatcgcgactcccctcgatccgaatgacgatacatatttgtcagatttccaacctggcacttacaaaatggccattgcaaaggatctactcagcaacgcgcgcaaggcaaaccgagagaacgaagaacaagccaagagggctgaagctgccccggccgatcctcctggtttggctgagaagaaggcgtttattgcggagttgatttgcaactacgagaagctggagtccattctgctacaaaaagatgcaaagacttgggccgagcttcatcccccgcagacaattcccgtgcagttcccagtccacgtctcgaccgagggaacacagctcacctctgagccttggaagatcaacttccacttcaatgtaccaggcattactgattctgctcgtgacggatatctgaaactgtatgtgcctccttttatctcacaacctaagaatatcccactgacattgatataacagtttcgaagcagcttggaatggcgacattggtaccataaaaaccttgacattgggcatgtggggacctctcaatgagaacgctccgcttgagattgctgtaaccgacaatcaaggcctgtctgccctttcaatttctatcatgcgcggccatttcgcagtggctaagaccattcttcgaattctccacgtgcagtacaaggtaaaagcgcctcgcggtcggatacactttgagatagatgtcgatgagtgttgtgatgactgtgatgactctcatgaagagaacgaagatttgaacatagtcagtcacattgttgatgataccttcacccacgagaacatcggtgaagttatgactcaagtcgagagcaatacttctcctcttgagacgttcgagaaacggttcaatgtcttcctgtttttcgacgagtgccagaaggaggattggaacaagcgagccctcctgtttccgaagctgcaccggcaccgggattggagttggatgaataaagacaactcgatcaacaagattgggttgttgaaatacgctgtgtacacaaacaacattcctcttttggagttccttctgaagactggattggaccttgcctctaccaacccttcggtaaaaggtgagttcttggtcaaggtcgacgagttccagcttgcaatctcacttggacgtattgattgccttgccaaaatgattcaaagtactggagctggtcttccacttacaaaattgagtgatgactgttgcgttgaggagaagaaagagcctcagtactaccctgggttgtcgattcgtggcagcaagcgtgctgattgggctaatgccggtcgagataaaccgttaaaagagcgggcacagtgtcctcctctccttattgcggctcgtcagggtaatttggctagtacggagtttttccttggtaccgcacctgctcgctattacttggagtatctcaattcgaataaggatgatgagagagtcaaacgattgactaagtccaagctcggactggaaggaacactcttgacctggcttcaagaaagaagtaagtgccacctattcaggaacccggacgaacatagctgaccatataaaagacaacctcgttatccactgcgcaatcatctccgaaccaaatgacgaatccgttcgtctagttcagtatcttgtggatcatcaccctgaatgcttggaagtccgatcgacagagggattgacgcctctcgcctgggccatgtcccttcacaaggtccgatttgcccgcatcttggtagaagctggagccaaccaggctgtccgcgacaaagaggcgcgcaatctcctccacctgattctcgtatcagccaatggtcgagtctgtaggaactccagccgatgcagcaaactcctagacctgctggataagcaactcctcccaacaatgctcatggaacgcgccggtaaaggctcaaggacgcccttttcccgttggcttcacgcccaacccgactttatgccaagggacccggccattcctcggccccctaagagtccccagaccgaggatgagatagtaacctccatgacgagcctcattctgggcctagccaactccacggaccaaaagcatctcgaggtctttgacgaagctggaaacacacctgttcatgatgctgtgaagaaatgcttcccccaagtccttggacaactccttgatcgtcgtcctgacatgctcaaccgggagaatgccaccggtaccactcctcttgaaatggcagttgacgcttgggtcaacaagagtacctctggaccgcctgacggttctccaaggtcgcaggttaatccccctgtgagtcagagcgctttgcagcgcggttgtcacttattcatccccggtagcagggtcacgtatgacaaggagatggctacgcttcgggtttgtcgggaatgggcccagcaacgacccggaaagagaagacttgttagtctgtttgaggcgaatgaggtcgctaagagattggtggcggcgggacaggctactggccgtgatggtgttgtctccgaagatgataataagtctgaggatgatccgtggggaagcatgtttgatcattgctagtttgcttgtattgaacatggtaatttctagcgcaatgattatttgtactgaatggtctttcttttttgcaatatatcctaatcatatctactgcttcattccctgtttctagaaattccagctacttgccaatgaacattcctgtagcttcttttccactatatactggaactgaaagattaagaaatataaatactcaaaagcagtagattatgatcacctcaaaaaatatcatgaacttaaccaacccggcttctgactcagtgctgctcctcgggtggcagctgaaccttcactgcactctccgccagagctctgttccgactattcttgctagcgatatacgaattaatatactcgggcacttcagcgaccgtaccatcaccgcttggaaccggggtaccaaacgtttcccataccggaacaacaccagtccagacactaccagtaatctgcgcgttgcctgagtccttacgctcatccgaaacaccaccatcacgaatcttaccgctgccatccacaatccttaccttcaggatgacagtcgactgcatctccgcacgatccggcggcacacgcgagtgatcccagcgatccgcgaggacagagttcgtgatcaatttcatggcccagagcttttcttcatcatctgtgacgagggtcgcatagccgtgtaggatggcagaacggtagttgtagctgtgcgagttgggcgtgagcgataggatcagcccgtctactttgcttgttgcgacgcatatggggagtccctcgccatcgctgcagctgcgggccaggttcataatccgtgagctgacgtagccgtggaggtagcactctagaggctcatcgatgctcgcagaggggaattcgaatgatcccatttgtcctatcatcggtaggattgcggggaatgggtcgtccgggcctgggttgaaggatacatgaagaacttgggagtcattgatgattgaatgaattggacctaggtcatatgtggctagaatatagtgttaatagttgaatatagtgcagatctatagtgatctcgtacctcgatgcttgtaccggttggcggtgttggaaaccttcttcgggtaggtcaaggttcggcccatgatgtatggcagtttgtagaatgtgtgtagttaagagaagcaagaggtaagcggcgacgatataagcctttaagtgtttactacgtagatagatgatgaatatagataggtgatccgatgagctagggcacgccttcaaacaccctttttagcaggtccatccgcgcaaggtttccccacaaaggttagaccgagacattcttgatagcaggctgcgcacagatgcatcaaaccaagaatcatgtatacgacatgacatgggagtggacaagagaatggtctccgatgccaaacgcagccgaggtgattggcccacaccgccgactggaccgcgaacctggcgataacaacgactccaacagtttactcttatcacttatttttgggaccttgaagcatggcggcatgcaggtctctcgtgcgccagtgcgtcatcaatctgcgctcatctagacctttgagtcattcattgcgccaactgcctagatgcaaccctctgtctcgcagttatgctacctcggtggccgccgcggaactcagattcggccaaccgttgcatgagacgcatccccatatcctcagcgcaggcgaacgtttgtcattatctgtgtccttgagtcttgtttatttcgctgatcgtctgttgtgtagttactcccggaataaccgcccttgaatatgcacaacgtcgatcgaagctcgccaacaagctacccaaaggcgcgattgcggtgttggctgcctcggaagtcaagtaccgtgcccaagggatcttcaatgagtaccgccaggattctaatttcttttacctgacgggtaagtttgcttggcacgcccgtgatgccgcggaggacacccgctaaacagttccacgccggataggattcaacgaaccgaatgcattagcgatcatcggaaacgacggctctggcgataaccatattttccatttatacgtgcgggaaaaggatcccaaggcagaactctgggatggggcgcgctccggcacccaggctgctgtggatgtcttcaatgcggatgaggtgcgaagtgttggcttaaccaggtgaatcattgagctgacaccgagaacagacaggaaacattgaacgcattggagatattttgccgagtattgtccagggagcgacagaagtttactcggatatcccgacattcgatggttcaagatcatccttgaatcggtatctgtatggaccaacactcgcgtcggaaaagttgaagaaggtcgtcgaccaccgcagagtcaagcccctgaagaatctgctcaatgaaatgagggtgttcaagagtgaagatgaggttgtacagatgcggcgactgggacaagcgtcagggagagcattcaccgaggctatgcgacaggactttacccgagagaaagatctctattccttcctggagtaccagttcaaggtgaatggttgtgatacaaacgctttcgttcccgttgtcgcgggtggccaggtaaatctctcgacttttttttggtgaattggacactgacgaacctagaacgctttggctattcattacacacgaaatgacgatgtattgaagttcgtatgcctttccaaactattctgagactctgctcacgcttaattttagggatggtgatttggttctcgttgatggcggtggtgtaagttcttctaatctgaactcgatcttacagctctaggatactgaccaaattataggaatggggaggctatatttctgacattactcgaacatggcctgtcaatggcaagttctctgatccccagcgggatctgtacaatgctgtgctcaaagtgcaccggagctgtctcgctctgtgccgcgagacttccaaactttctttggacaaacttcatagcatcgccgagaatgggttgaaagatgagctcaagtccctgggctttgatatttccggcaatgtatgcatccgacctccttccgtgggtatgccgctgactccgactaggcactgaacgttctcttcccgcaccatttaggccactatgtcggcctggacgtccacgactgccccgggtattctagagggtacgacctgaaagcaggtcaatgtataacaattgaaccgttcgtccccagcctctttctccgcagacttgaaacaagctaatacatgccaggggtatctatgttcctaatgatgaacgatggcccgcccatttccgtgggatcggaattcgcatcgaggatagtgtttgtgtcggagacgaacacccgattgtcttaacccctgaggctgtcaaggaggtatgttttaactctagtaaccccccgcatgcactcgtgactaacttttaataggttgcggacattgaggcactgcgtaattagatctgatgtatacggtagccgttagatccctcaaattcccatgtacaatagcataaggcttcaaaagatcatatttgtgcccctttattttatcctatctaatttctaaactaaaccctacatgtctggactatccttgcctagattactttgtggtggctggtctgcggccaacccgaaggctggtccggggaggttggagtcgattcggcaatttttagcggctgtatgttaataagagaacattgcacaaaatatccccagagaatgagaccgagaatggaagtagagaagcaaagaaacccgaaaagaatcttggtcgcggtcaaagaatgcaatgttgatgttcatgcttcgcgctctgccgttggttgtcaggcctccgcccaaaacaaactaagctccacaccacacgacgtgctttgctcttctttctttcctcctccaggtcttccacctcgtctttctcttcccatccaacccttgaacacttcgatctatttctctttccttcggctgcttgttatcgtctcttggatacaatgtccattctctgatctcctctaaccttagacgtgtagcacgcgtgctcctgaccgagtacccctctttgatatttgactgttgtcactatacaacgtttagacgcgttctcgaccctgggaacttgtttcccaatggcaactgtcttcgtacctccctcgccacgaaactccatggccatggcgactcgtcgtccactcgcaaacgtgccgaatgcaaccaattctccacacagggcagggctgttaccagttaaacgagctcgctctactcaaacggagatcccgtacggacaaccaccgccgaagaaacaattgattgagagcatgcaatacgagtctcgttccgccacctgtcagaccacgaacacggactcgaaacttttcgcccgacgatcgaacaacagtaaccctagtgcgtttgaaaagaggctcgtcgcagccagggagaaggaacgccaaccgcaagtgaagcacatgagagtcgagaaggctccggcagataccatggactccattcgacaatggcagcggcactataggaaggcattcccacagtttgtgttttacttcgatagcattcccgaggatgtcagacggcggttctctcgccaggtcactgcacttggagctgtaagtcatattgcccacagaacattgagctctcccgtcttcagtgattacacacccccattggcatcttctctaacacactgcgatatagcgcgaggagaagtttttctcacgcctagtaacccacgttgtcacctcacgagctatccccccagaatcggccaccccagcagaaccggagtcaactgtagacgctagaaaccgcgatagcaacgttctgaccgtcaacccttctctcatagagagaaatggcgacaatcacctgcatgcttctttgaaaaccgagacccgacgtgaccaaggcaccatggacattctgcaaagggctcgacagatgggcatgaaaatctgggcgttggaaaagcttcaacgtatgatcactaccatcaatgacagtgacatcgccgcccaatatgaacaggctgctcggaataaggccgctggtggtaacgccgccaacgctgatctttcgcgggttcttcgtcaggaactgcttaatgggccgtccgatcgtgatccattggcatcacttgagatgataatgttcaaaggtccatttgtctacatccatgacatgaacgagaagaccaaaccagtcatggttcgagaatatccccgagtcgctagacgccaggatggatcttggccacagttccgaagtgcccccctcggaaaatgtcccttcatagatgagcccccaagcaggaaggaatatgaccgacaccgattgcgccaaattcacaaagagaagaaggctgcatctcacgcggctgatgggacacgtcatgctaagccaaaagcagctgcgccagttcaagctcccgaatctgtgaccacaacagagatggcacactcccagccatcggcaaagcaagaggaacgggttccgcctccaatccaaaatgaaacccaaaaaccattggatgaaacccatgagcgaaagagttctgaaagctttgttcctccccacttccctcgcaccgggcccttctatgctggttgtgagccagctgcctccggtattcagccgtcgaacatgacatccgcaattcgctcacaaatgatctcatctactgctgctgcacctggcgcgaaagctgggctcagcaaggaggttcatgggctcaaacgaaaggttcttgagaaaggtacaggtggattcacggcgggatcgatggctgctcctcaacgccgtggggatggattcaccacggttacgacgaagaacaacaccaacccccctggtaaacccaacgttgtcatcaatgaaaatgaggcaaagcaatctgaggtcgctggttccaagcgacaaagggaggacaaagatgagcaaaagaaatccgaacgccgcagagatcctaagcctggctattgcgagaactgcagggataagttcgatgattttgaagaggtaaaaaagattatctaggtttccttgttgcttaggtccttctcgatactgatcaatctcttagcacactttgactcgcaaacaccgtcggtttgccgcgaactccacgaactgggctgaactcgatgcattgctctccgaaatccagcgccccctcaaggacgaatatgaatatgacgaatagatttgccgtttctcacagcattccatgatttcctttcgacctcggcctcttctatccgatactttcgcaccctggtggagtatctttcttctaccacattgcatttttatttccgtcatgtccgatttgaacctcagaacctcgcataaacataccctcggcatcgacacatgcatggtggcgtttttttttccccctcttctttttgtttatcatgcatcagcagtaccagtaaccagttcctctccgacggtctgatctgcttggcttgacctcaatggaggtcgtccactcttttacagcatctttcttcacttctttcgattgtattgaatatccgattttaaaacagcatcaggtcgccttggaattcgtgaaccgacctatatcaaccgccgacggcaattttggatactttcatttctcatgttgctccaagaaaaactcaacgtcgacgctgcttgtctcatgtgcaaccagcttctgctttacggtctctaatggtggccggttgcgatataccgaaggtataatggacgatttagcatggaccaagggttcctaaccttgcattgcactccgttctaacacatcgttatcccctttttggtcccacggggccatattttctatctcgtcagcttttccttgcgtcttctcactggtggtaccttgttttctgatgggctgtggcttgaatacccagcgtaggcggccgagtctctgttgagatttttactttctcgtgacattacttacccgaataaccatttattcgactcgatgatctgtatgcagtttgtatcgtgctaattgaattgtctgctataaaatatattcttcagtagagaacaccagccagaagtagaaaagtagaaagtgtgcgaggcccctcacttagcccaatgcggtaatcacctcggcgtgacgtaaactgcgagcggtgacattagtgccaggcggtgagagtaaaaaaaatatcccctcgagctccagtcaatgtcaacataataaaagctttatattgaatattcagttgataaagagacaattatcatagtcacatattcctactagcgctagatcggcgtgaatgcaccgttcctgagcccatctaccttgcagccccgcaaaacgtctcggtactcggccccgtaatcggcggcagtaacgaagatcttcaacttcaggaatgaatttgtgatgctcccaactacgccgcataacccagcacgttccgggcagaaggatattgaaaatacaaaaccgaagctccggacatattcctcgatatatgacctctcgccctcttcatcgtttttgctcgcacacacgaaaagcttcagttcgccgctgaagtcataattcctttgatattgccacttctacagctcggacgggatacaacttgtgcatatatcattgcatattggtacatattgagatatatacttcttgggcaccgaaattctcgctattcgagatcgtgcgtcacgaggtgcagccgcgccactccgtttttgacaatcataccacaaacccaatggccgccccaggctctgtgctgcagcgcacagcgctaatctcttcatcgatgctaagaacgagagtgatatccgctaccaggacgcaagccacacacacccttcgcaccggccgctgctctgccctgtcctcccacataccgacgcaccccctcttccaaacccgacatagctcctactccgcgcccacactccgtgaaaatgaaaaggcgcgaaagaaggttactatccagacgctccagaacatgcacaaaaagggggagccaatcacaatgctcacggcacatgactttcccagtgctcatgtagccgatgcgtcggggatggatatggtgttggtaggggatagtttagggatggtagcgcttggactggaaaacacgacggaggttgttatggaagagatgattcttcattgtcggagcgtagcgcgggcaacgaaagccgcgttcattgtgagttgccgggattttttgactggctccacagtgccaccgactaacaatcataccccaattccaggtcggagatctaccaatggggtcgtatgaagtgtgcgcagagcaagccatcgagtcatcactgcgtctagtcaaggaaggtcgcgtacacgccgtcaagctcgaaggtagccaagaactcgcacccacaatcaagcgcatcacacaggccggtgttccggtggtaggtcatgttggtctcacaccgcagcgtcagaatgccctcggcggcttccgtgtgcagggcaagacggctgtcagtgcggtgaggatgctgcacgatgctctcgctatgcaagaggctggcgcgttcatgctggtgcttgaggcgataccgtcggaggttgcatcgatcatcacgcagaaactgcggatcccgactatcggtattggtgccgggaatggctgctccgggcaggttctggtgcaggttgacatgactgggaatttccagcccggtcggttcgtgccgaaatttgttaagcagtatgcggatgtttgggatgaggcttcccgtggcatttcgctctatcgcgatgaggttaagagtcgggcgttcccttcagaggaatacacgtatccaattgcgaaggatgagctcgccgagtttcagaaaacggtggacgaggtcttccgggaatcatgatgcgcctgattgccattttttccgtggccatttcttgcatattttgtctatattaatgcatcatcatcatcatttgtacatagcatcattgagcagttcgcgctggttgttcatagcctactcagccgaacgctggcgtcattgaataagcgacaatcaattgatcgtccgttttgaaacactattatgacattagcattcaaactcgaggaagtacggtagaaaatcgagttgacactcaccctccatagtccgcccatgccttcatccagcccaggcgcaaacacactattaacataacaaaagacagaatcggtctctttgcagtccagcttcttgcgcaggaatttgacaactgtctcgaatttctgcgaagcgctaaccttgaacacccgacttttcaaaatcggggctgatggaagaggctggaagcgaacagtaacttaatcactattagttgaattctaccatctgaggatatcgcggtgatctgatcaacccaaagcccggagaagaggggtcctacctttccccgaatcaatactctccacgtctgcaagagcctcgtgcgcatcacggggtaaattggtcagcatgaccgatgcagacatattcatcggtagatcagcgccatggtcgtcatctgggatcggggcgtttgctgagctgggagtgcctgagctctgggactgccgcaggcttgggcgatggctgagtgtggtttgtagatttggagtgggggagcgttgtggagaacgtgttggagaagatggattcatgatgtatgatgctacttagagaggtacgtagatgggaggagaaagatgtaagtaagttgggggttgacggaggcggggggccttaacgcgcttaaagtttgggctacgcttagatgtgtaaacaatcattttctgtagagcttcatagctctgaaagaagtttgccttcttttcttttcatagataattgcaaagggtttacttagatccaaccttctggggtcggaggtgtaaagttaacatcaggcagaattttatctgggaaaagctctctccacttctttccaccgtcctacatcgtcgggtcacgcaaaaatggaaccgggcagtcttcgatcattgataaaatgcagctgcaaggagtcgcagcctcagctgtagctttcttcttggctctcgctttagcattgtccaaccgaatgctcttgcgctctatagcgaggaaaaccaagaaggacaccccggctagggcaatactctagatccaaacggcctatatctcgccccataggaaatatcaactctttccctcttgactccagtactacatttgtacatgtggattgctatcgtatttcaaacaatgtacccaggctctgacatcacattgtaggctcatatcttccgtatagaccatcgccgtttctcccttttgataagcttcatccagctatataagtagctctctgtttattgctagagaatcatttctgcttctcttttctccctgtcctctgatcgtcccaaaatagtctacagggcaatttcgcagacgctaagaacttcatgtcaaaaactatgcgcataccaacaaaatgtttgataaactcgtcctgttgctcctgtcttactttttggcactgtctagtaagtttggcctcagtttggtctcttttatttcagtcgcgatggcgattcggatagagcaggggcctgagtccaccgtggcggagctcgtccgccttgctgaagagaagggcggtcgagtaatggccgacgtggccactaacctcatctcaatcgttatggtgtgtgctgtgaccctacaaggcatttgacttgtgtaccaggtgttatggagactagttgaccagtatatcccttggtcgctgttccccgtgaaggaacaacaaactgaatcctgatatagctagtttctagcaccaggtgctgggaggttttatattgctgcttttcccttgtccgacaagcccaagaagggattggtgccgagaaagtcaacgatatctcgaatctgcagaccgcaatctcgaatcttcaaaccccaagtatcattgtggatttcctagatgaatcaataaactataagtaggcaatggcatatcgtacaaactatgatcttgttttactcacatacaaatacgacattagaactaagagaatatgtaccaggtcaaggctttcccgagcctccccactggttagagcagcacttcccacaagtggcactattcacttctccggttcccaaggctcgttctccgcccaacggcctggggcgcatggttatgcgcggaatatatatctggggactaagtttgaacggcgatgacgcgggagggagaccgtatatgcagctctgaaagaaacgagataaccaccttcaatctgcaaaatcattcatatctatcaattctatggtttaatctagacctagataacaataaaacagctttatatttaatccctccctctttaacttgcctagatcgatagcacgttgacttgtcaaccaggagaatgatcatagattgaacctctttctgtgaggatgggactattgtcagttctggtgcgagagggaggtcaattacaagtcatctttgattctaggcttaccttactatatcattgagctatgtatgtctctctaaataaaggcagtgtcataatgtttgccagtttgttataatacagtcacagttcctttcatatgggtgtatatggcagcgacaaatcggagatcgtctgataaatgcgtatggtacgcttacggaggatagttttttaagcaaatcatatcttcgtttgatcttccattcaactactctcctccacttctttatcacacaacacaccatggcgcctgtctatcatggccagtggtcttttgacaaggacactttctgcgtgacttcctccggtggccatgttcacccacgtgcgacgtattccgagctggatgacattttctgtgcacctttaggcgacatcagggacagagctgaccatcaagatcactggtacgaagcacaacttctccattttggactaccaccgacaagaagcaaagctgcagccaagatgaggttgatggatgccttccaggatgaaactctagatgttccggagcaaattctccggatagaacaatcactgtcgaagaagtgggccaaacgagactcagaggctcgtgtaatgggtccttcgatgcgacccttatttcatcctatcatcgggagagcggcggcaaccgacactaccgaatttggcaccacccagaaaccgtggggtaatcaggagggaaatgcatttggtacaggcttcgccggaggagccagtatgcaaggcaacatgcgaccccaacgaaaccaaatacgaccccatgctcattcaaatggaaagaaacgtaaccacgaagagctcccgacccgccctatgaagaatgccagatctcgtggtgagactggtggacccaacttgcaggaccagatccaggtcaacccgaacggcgagaccttccatcagagaccgacagttattccagtctcagttggaaacggacagccactcccggctccaggcatggaattccaacaaattggatatcagacagtgcctctatcgcaccagactacatatgagacagtgagttgtctttccgtgtataagaaatacagtataaccatatctgaccacaaacgcaggacacacgactatcttcacccgggctaatggacatcgacggtccaagtgattagtctaggtacggctacaatccagccaatattctcaacctcaaggctggatggagttcagtagccaaggtatgagtggacttcgggatttggattggtgaaggcaaatttgagataagctaggggcatgagaatttgtgttaggtgctactagggggagaggaagattcgtgaaatgtttggagttcaattgattcaacggaatttgatagcttgccagtctccactttatgtatcaaccagtccaccactatgatgcctcatgtcaaaaatcagtggtactcgttgtccttcaacaagcttcgcctctccacataagtaatctcaaatcgaaaaggtgcatcaacaagcccagttgacttctcccattgtggatccagataccacggcttgatcagcaagacctcgaagacggtgggttgtcgaatctgatgcagcgggataagccaatcgtccagacggtttgttacgtggggatataaatggatagtcaatttcttcaggccaggcagcttggtagcgagaatctgacagcatttattccaacttagaccaccaggatccggaaagctgagctgcagagtgcgaatcatgcttaagcgctgtggtagaagtgtacgcgaaaaatcaataatcgtatctgtgtggttaaagaggaaagtgttcttttggaagatcatatcaataacctcggagtatctagcacgctgttagttggcttatttcaaacatagatggaagtactcacagtcttcgacaggtttgtaaaagaggcacaaaatccgctcttctcgtgtcaaatttccactcggagttctcgtggtaatatgatccgtagttcatgggtgtgatgcagtttcccccgggccgacgagcaagcaatccccaacaatgatgactgcatggacagaaattgcgaggctcgctgcataaaatcccgacaatttctttacgggatcgtttccatttgtgctggtccggtcgtataatatgcagcatccggctacatagataatgttcccaaatgagaagtcggacttcagtgggtagacattcgaacagaggagactgggcttgttggagagtagattgttgctcgcgtcgttttgaaagtgatagtcgccatccacgactagtcgacactttgaggtcttcattctccggaagtggtggggtgagtggcctggggcggggttttgtagataaactgaggtgatttgagtcgtcatcttgaactcggttcttctttgccaaccctagctttttgccatctgcctcgtcgcccaggtttggcgccatatttgaactcgtagagtgaaagttggatagtgttgcgtcgggcgatagcgacataagagctaaacacgctgacgtgtaacgtcagcgcgcgtctcagatgtggactctaaatttgaaggctaagagctaagatttctatgaaggggatagaaattgaattgaagtcaagatgataaatcaaacaacgaacgtcgcccaaatgtaaaacatatagtaccgggacggccttgtttgtctgcattaaactatgccaatgaactatatagcagagacagtcaccaaaatcagacgatacttgcactggatgatctttttcactttcgatcaagctcgggatttcacagcccaggtatatatagtggatttttacagggaacccccatatcgacccttctgcctgattatgcctgagacaaacatatactaacagtaacaaccacaaggaagagacggatagcaccaaaccagaaaaagttcgaaaccacccaacgaggaacgtcagaagcgttatatctaacaaaatccccgtctatccagacagacaggaaagcgaaagaaaaagacaagtaaaggggacatagtggtaaatagccaggaaggatccatcaaggtcgacaacccggccaaagcataacagagggaagagaatagcaaaccctgactccggtaaagaaacccccgtcgagcttgtccctgccggagaggttattgcggagcgaagcgaaggggctccaaaatcattagaatcaatacagtgaagatgtaatcggctaacgttggcagaataatccaaccggcaaaccaaataaaccaggtctaatttggctagacgataatttctattacgtgctaactatgtagtgttagcctagttacccaagcagtttctcaagcagttgcttaagtacttagaatcctagagcaaatagactctcttcctttagattaaactagcacgttacagtgattacagaactataaccaagtaagcaagcaaggatggagttgtggcgatgggggccgaatgaggggccgaatgaggggcggcgaccttgcaaggccaaagtaatatattgtctaaggaagccgatacaacgtacaaaccagcgacgcgaacctaggagcctgactggccaactatcgtcctcgagagtggatactccgatagtcgacgcacagtggtggctggtcaatgccggcggcgacgtgaagacaatcctccttatctcgataaatagggagaggcaggccctccacctcgaaagatggtgccttgctccaccccacaaccggcccacagcccgccacgccccgagtatggtcccgacgaaggtggacgaggtagatattatcgtgggtaatcccaggccatactcaagtactatacgtagtactgtactaatcattgccatcataggttggcacagccggaatgtctactggcatagcagtctaacctaattagtataggtcaatcttggcattttcaatacacggaccatttaatacggtttcgctactgtaaaatgcacagctttgaataccggaggatctattagtcctataatgtctattgtttattttaattcatgtaatcaggctctataaattgctaagtagctgagccagtactccattgattggacctatattttacagaaccggtttagccgacatgttttcgatgccttacagatcaggcctcattcggtataaattccccgcatccccactttcatcttcgcccttgataagctcagctcttcaacgtccatattgtgacttgaagaacatggctgaaaagagcattgtaccggccgctgaccttgaatcatttacggaatatttaggaggctgcaaacgcatcgttgctctgcttggagctggaatctcagcagcgtcaggcttacccaccttccgtggcgcaggcggactctggcgctcccacgatgcaacctccctcgcgactccggaagccttcgatgagactcccggtcttgtctggcatttctacagttatcggcgacacatggccttgcaagccgacccaaacaaagcacactacgccttagcggagctatcgcgaaggaatgaagacttcatcacattgagccaaaatgttgacggtatggatgtcggacaagtgcttctgtctgaattactaaaatcccctcgtgtcgtttttaggtctctctcagcgagcgaaccatccctcgaagcagctgcatcttcttcacggcactctgttcactgtcaaatgcaccaatttctattgcgattacaccgaagacaatttcactgaccccatagttcctgccctcgaaattccaaagaagagcccaggccttaatccctctgcgaccgacaagactggcgaggaagcatcgaaagcgctagcagaagcgctggacggcaccagcaacgaagtagacatatccgattccagcaatcctatcgccacagtgagcaaagaggagctacctcaatgtccgaaatgcaaggatggattgctccgaccgggagtcgtatggtttggggaacccttgccggagaagacgctcagcactgtcgacaagtggatcgcggccgggccaattgacctatgtttggtcattggcactagcgcaaggatctggccagctgcggggtatgtccatgaggctcgttcgcagggcgcccgagttgcagtgtgcaatatggaccgcaaggatacaccgggcgagcttcataacggtgactggttcttccagggagatgcaggcgttattatccctgagatactcaagagcgttattggcgagatctgaatctcatgggaggatggatacgggaatggcgaattttgatattggggtttgcatgaactggtgacgagacacatgatagttggatgacaaggagctttggatttcatacaaactgttatttctaggtaaatctacgaatcttacaaatgaataggccaattgcacagactccgagacaccactgccgtatacaaatgccgatcatgcctcgggtattcaaatttaaaaccctagaaatagcggaattatgagctgatctacaattgcaaccaattggcccgaatccaacttgtatttgatatgcggggttcgtaaggagtacatatatagatctacattaccctcaacatccaaggggtgacatttaaactcggacgcccccttgacaatacgtaccaccatcaattgtacctcaattgcgcgacagacacaatgaagtcgacaactacagtaccccagaaacgaaagaaggaagacagcgatgatgaggatgatattgtcaaagatggcagcctcacatccgctgctgacaatttcttcgaggcactgtgtatgtgatcgaagcttcacgcagtccattggaaaggctaaccttctttccagttgaggccggtatcacatactgcttcgtcaacctgttagtgactgtattagccactaattctatgtgttctgaccggtctgatagagggagcgaccatcccgcgatgttggaagcaatgatcaaggctaagcaaggtgagtaccggatatgttaccagtaaccagggcttatttatgatagaaaacaaacccaattttccgagaatcattacctgcccttctgagctagttgccctatcagctgcactgggatatgctcaagctacaggggttccggtagatgactacgcccatcatatcaattctttcgctaacttcttgcaagcaatgcgtaattgtgcatgtcgactgcggcactcttgctatgggacagtccatacataatgcctccgtcagcagagttcctgttttgtgctttgctggtttgagcccttttactcagaatggcgagttgttgggttccagaactgagttagcaagccaaacgaagaaggtttacatggagccagctgactgatactgaagtacaggttcatccattggctacaagacgtacctgatcaagcagcgattgttcgacaatactgcagatacacgggtgaaataaagaccggacgcaatatcaaacaaatggtctcgcgagctttgcagtttgctacatctgatcccaaaggtccggcatatctaatggctgcgagagaggtactcgaggaagtaagtattcgaagttatcgcaataagccaaaattgtctctaaccatatcttatgcagcgtgtgggaaatgaatctctagacggtgaaattctcagttcgatcaccccaagtgcattgccagagcaaggtagggtgataatttgagatttgagatttcatatcgctgacagcaatagaggtagaattgattgccaagtcgctgatgagcgcaaagcgaccgcttgtcattacaagttatcttggtcggaatctcaaagcgccagccctcttagccgaactttgtgataaacttccaattaccgtcgtggagatggtcggctctgacgtttgcctccgaagtgaccacgaagcatatcgcggcgttaccgtcactactcatccggaagttcttcaagctgatgttattcttattcttgattgtgatgtgccctggattcctactgctggaaagcctcggagtggtaagaatgtccaaaaaaccatgtttcagtgctgttctgacacacactgcaggggcaagggtattccatctagatgtcgatccgttgaagcaacagatgccacgtaagttcatatatcgaccgtattgctgacttttctctgcttttttattaacgattacataccagtcttttcaagcaatgccactcgcaagctcaaggttggctgtggaattgcgcttgggcaaatcaatgccttcttggataaacaggatatcgaccgggctaagtataccctggagtttgaggagcggtcaactaactacaaaacctggagggaaactttacaagcacttgaatcaccgtcgaaagatggtgtagtcagtgtgccatatctggcatcgagactgcgaaagtctctcccccaaaacactatttacgttttggaggctgtaaccaatgcaggacacctcatccaccatttgaacttgactaaggtatgtatttatgccaatgtgctgattctatgctaatcaaattccagccgggaagtctgattgccagcggcgcaggtggtctaggatggggaggtggtgcagcactgggcgtcaagctaggcaagcccggctcattcatatgtgcaatgtaagtgttcaccagcgcgggagctcttccacaatatctaataagcatcagcgtcggcgacggagtctatctattctcgcagatggaaagcgtatattggatcgccagacgctacaatatccccttcctcctcgttgtgcttaacaatggcggatggaacgcaccaaaggtgtccgcacttctggttcacaaggacgggttatcatcgaagtcgaatagacgaggtcagccagatctaaactaaatatcttgtgcatagtagctgatctagtacagatctcaatatctcgttcgacccttctcccgattaccccggtatcgctgctgcagcaggtaaggcgtggggtgcgacagttaccacgcgaagcgagcttgatcctgctatcaaacaggcaacagaagttgttcaaagtgggaaatgtgctgtggttgaggtttcgtgagtgggaatagtggctcttaagtaacaaccgcttactttcatctatagtgttccgtctatgtggaaagagaactagtacaaaatgccagaagggtaaatgggaaaaccagttctcattttctggcttcaagaagaatttgcttctttttgtggtgtgttatgttgaaactgcattgtctccaatgcaatgggaggtagttgttgctttgaaagtatgaaatatgtcagctactagacatagattgggtactagcttgtatgcgattgatctgattgatatctagatgtaatactattcttgtactattctccaagaactagatgtgccttttctttccctgtgctgcctgaggcacccagccgttgctaggccaacctcaaacaaagcgataaccttttggaatcgataacgacttcttctccctttgatgctcgcaaacccccaccatcgacaaaccacttcggattcaaggcatcatctaagggtgagtgtctccaaccctgttatattggttacattttcctggaactcgaaatttcagttcctaggggatcccacagtccacgagctggtcgagcccacaaataacataaagagactaactgcgaaatccagtgctcagatatccctcttcgcgtcttgatgccctaagattagatcattccagacttggttatcctgtgaagtcaacaaacaaacctatcaattgtctgacaagatctactcaaaccacaacgtcaaaacacgatggctagagaaagcactgcgccaatggagcccctcactccagggggaaaaccaaacacccagcctcacccggcacacatccaggaacccgaattcggaaaaccctcaccgatcggccccgcacagcacaggtcaaaccaccttttcaacatcccgaagccaaatcaatctcgtgccgaacatcatcgacccgtccctcgaccgcatccgcaacagcagccacaatcacaccagcaaggccattcgactgctacgccgttggtgaagcgaagcgagccatgggatccattcaagccggtcgcaccatcagcctacaataaccctcgcggagggttccaacatggcgcagtgagtatcaagcgacccgaaaatgttacttggacaactccccgggcccctaggcctgtatatcaatccaagcctgttccaccaaagatggcgggcgcgacgaagaatatacagaagtttatagatctcacacgcgacgacactgatcctgttccaagggcatcagcctatgcggcgccgggcttcggggctatggatatgaatggctacgtggatacggctatggcaaacgagaacatcaaagctttgctggagggtgcattcgaggatgaggaagacaaggctgagccgaaacctaagggcaagaagaagaagggtggaaagaagtccaagaagatgtcacagaagaagcaggatgatgaagtcgcggtggacgagaagaaggaacaagcgattgacgacctcgatgatcttgctgctcaacttcaaggggtcacagtgaacgacccgaaggataataatggcgccaagtctggaaaagattcatctaccaagcttgatgaagaagacaacgaggcggcagaggcggaagaagaagaagatgaagatgaggaggaggattccgacgatgaagatgccggagtcgtcgaaggcttaaaagtgactcttcttccccatcaaattgaaggtgtgagatggatgtgtgacaaggagactggccgaaagacgtccaaagggattttccccaaaggcggaatccttgcagatgatatgggtttgggcaaaacagtgcaagctattgctttactgctcaaaaaccgcaaatctgatcacgaaaacagcgatgacaacaccgagtccgcaggcaagacgaccaagtttcccccaaattgcattgcctccactttggtaattgcgccacttgcactcatcaagcaatgggaggcagaaatcaaggacaaagttgagccatcccacaagctgagtgtttgcatctatcacggtacaacacgcgcaaaggcttcaacgactttagacaaatacgatgttgtaatcacaacgtatggaactcttacctccgaattcaactcgtccgcatcagacaaggccaaaaaggcgggtattttcgcagttcattggtaccgtatcattcttgacgaagcgcatacaatcaagaaccgtaacgccaaagctacccagtcagcatacgcattggaggcccaacaccgctggtgcttgacaggaacgccattgcaaaacaacctggatgagttgcagagtctcatcagattccttcgcgtgaagccctatgacgatttggccgcatggagagatcaaatcagccggcctttaaataatggccgtggaggtctcgctattcagcgactgcaggtctatctgaaggcctttatgaaacggcgcacaaaggatgtgcttagactgaatgacaatgtgaagcctggcgaagaagaaccagacggcaagccaaagaagtcctcaaatggattccacatcactaagcgtgaggtcattaaggtggctgccgaattcatgcctggtgagttaaacttctacaaacgtctcgaacagcgaacggagaacagtcttgagaaaatgatgggtggttccaaggtcgattacgctggagctttggttctgctgttgcgtcttcgccagtcctgtaatcacccagacttggtcaagggtgatttagccaaagacaaagatattcttttgcagaacggcagtacgaatagccagtcgaagtcggatgaccttgacagcatcgccgatcttttcggggcgatgagcgttgtggcaaagaaatgcgatgtttgccaaacggacctgagtcaggctgaaatcaaggctggtggcagtcgctgtggtgaatgtgaggccgacttgaatgccgatgtcataggcacagaaaagaagaagaaaaagaagtcgaagaagagccacaaaaagcctgacgttccggactcaccgtcagcccgcaaatccgatgcacaaattgctcgttctcgcaaaaatcgacgagtcattattgacagtgacgacgaagacgaagaagaaggcgattgggttatacctcgcgaccagcgcaagatgcctaacctcggaaaagcaggtggctcggacgatgaagacgctgaagggggtggtgaatggctcatttcggatgatgagaccgatgatgagaccgatgatgaggtcgaatcaccctccagaaggaagagccagcccataattctgagcggttccgatgatgagagtgattccgaagcggatgacatctacaacgatgaaggagaaaacggagagcttccatccactaagattcgtcatcttatgcggattctgcatcgcgaggcaccggacttcaagttcatcgttttctccgtcttcacatctatgcttgataagattgagcccttcttgaagagggctaatattggtttcgctcgctacgatggtggaatgacaaataaccaccgcgaggctagtctcgaaaagctccgaaacaacagaggcacccgggtcttgctctgcagtctacgtgctggtgcattaggcctcaatctgacagccgctagccgtgtcgttatcttggagcccttctggaatcccgtgagttacaattttaaatcatctattgcgcattgtgctaaccctgaagctagtttgtggaggagcaagctattgatcgtgtccatcgcctgaatcaaaccattgacgtaaagatctacaagatggtcatcaagggtaccgtggaggaacgcattgttgcgttgcaagaccgcaagcgcgaactggccaatgccaccatcgagggcaagaccggcgctggcaagctcaccgtgcgcgacatgatggcgctcttcggtcgtgatgcagaatcccgattcaccgataaccagagcaccctagacttcaaccagcctactcgactgctgaataccggtgatgagaatgagcctgcttcttcctccactcaggagtctgcacactctgttccgcgcggccggggaaacgaggtcaagcctaaccggccgcgaaatgaagactcggtttatggccgacggtggtaatcagcatggtacgaaattatgaaatgaaatttggagataacgtttgcgggagtcccggttggtgtcaggaatgtgttcgtatttctattaaatttatttcatttcttgtttgatgttatattttactggctgatctcgtacatatcttcaacccattgttgctatgctaaaacacacgtctccttgcccttcattccccattgtcggcctgaggttgctccaggctaaagagtggtggaaccttggtcgtttgatggctggcctcacgcctcccatgtatccggaaacaatgcccgcgagtcggattcccgcccaattttagacatggcgatttcacaatggcgctcggcattgtgctccgattggcatacctatgaatctggataataactgccgtcgctatagataggagcagttcaagcactattactacaagtgtgctgtatgccatctatttagtactgatggatgggctaactcaacttctttgatctattctgacttattatacttgatatggcagggcagaagctaattgagagtctagttgtcaaatccaagtcagttttaatgccgccatccaacacgcttatcacactctagctgagcagaccactcatctagaatgtgtggggtatcgagcagagatgattctcgatgggccggaacaggtacctccatgtcaggttctatggttctggtccggaatcgccgagtctggccttcgtgcgcttgaatgtcagtaattacctggagatctttgattgaattgcgctggcagagcacggagttgaccagcacgccaaacctctcaagatcaaagagcggactagggtcaatgcaaacgtacacactcctcgaatggtctggatatattcaagccaggactcgatcagactatttgccgaagcttttaccatggatatgagagtctggtccaaaggattgcgagcgattctcaaatggtagtttccggcgaaccggacaagggaaccgaggacatgctcccagggaggaagcttgtttctggtggatcatgccttgataggttgaaagcccacagaagaaagcatgggctggggaagaaaacccccgtaaccccggttgaagcatggcattctggagatctttcaatcttgtaactatatactcttccggtctcatttgattctcttcatatactctgtgtgcacccaaattctccttcatacacgatggttcatgctttaccgcgttaatacatcgctaacattctgtgagctgcttcctgccaaattcgctgcccaatttatagctaacgctggtggccttcctagttcgaaccattctcggctgctctctctgctgaggatcgaaggctgagatatgtcttcaccgtccgacattaaagataacggggattggacggtcatttacgatgaccagagtgacgatggccagaacggcaagaaagaagaaaagccttctcgaaggaggcagtctctcgcgcgaacgttatccataccgaagagcatgtgcatcatgtctgacaacaagactgaagtatcgacggtagccgagctgctatccccgaagttgaaattgcctcaactgggcaccgaatcggcggaaagagtctttcctgttcgttccgtcgtctcatttgattccacaccttcatccgccctgcagacaccttccctcgataagctcgaaacaccgatatctcctttttcggacacatggagtgcaggcttcagcaatgaacaagcgggctctcagcagaaaagtccacctgggaagagtacgaatgctgaggatggtgtctcaaagagatccgaccatcccactcaaccgcgtgctgagaatgaaattccatcggtactcaaaggacaaccttgctccagccataatcttgacattttggcacaattgaaaaccactgtgcaaaacggtggcgaaatccttgacatccacaaatcaacaaaggggatatgctactcgcatgaagatgaagagaacatcttcactcagtcattcggcgcactggttgtgataaaagagtccgacggtaactttgaagtgcatatagcaagtgaaaactccaaggaaatcatacagcattctcctgatcaactcttcgggcttcgaacattttgtgatatattgccatcatcgcaacacagcaactttcttgctcattctaaattcgttttgagcgacgactactcagtccaggactctggtcctgaggtcttcttcctttgtgtattgtcacctgacggatatattcagggtacttggtgtaccatgcatacgagcacagtatataaagactatatcatttgcgagcttcagcccgagcctcgagggacaaaggttcagcccgatttggagaaccccgaaattcaaacgacaaaagcggatagccagaccttggacatgacctctggagcatttcctgagaatatcaatcctccgggaaaagaccttgataccagaaatagcaaatttcccgacccatcggagcttctcaataccatccctcgaatcctccagcgatttgcaactgctcaaacgctagaagcgctcgttcaaaataccatcgccactctgcagaatatcattgaatttgacagaactaccatgtatcatttcgatattgaccgcaacggaattgtggtcgccgatgcagttgatggttcgtcggggttaacttcgtacgaaggcgtgcatttcccggaatcaaccttccccgaaggattgaagaaactatacacacgcaatactgtatgctgctcttgttctagaagccagggcagttcaaaacttgtgtatcgggcttccaccaacaaaaggcccctcgacatgtcaaacacctatatccatgcagcaccggcgcccttaacgccgcataccgagaatcccgtcagggcctgtttgtcaatccaaatcaatgtctttggtaagctttggggtctcatatcatgtcagtcctacgacagtggccaaatgctccatccgctcatccagaaagtgtgctggtttgtagccgaggcggtttcaagtaacattgagcgtctgtcctacaccttaccctttcaatttcgagagccggacatctctttggataaaacgcgcacatctcaggctataaagaccccacccggtgatcttctcagtctgttcggggcagattacgctgcagcgtcgatcatgggcgaggccaaaatcttggggaaaccaatcgactcgcaggaagttttggcattgttcgaatacatgaaagccaaagaaaatgacacggtgttttggtctgcagatatcgctgccgattttcgggatctcaattactcgcccggctttcatcatctttctggtttgctttacgttcctctttccattgatggtcgtgattttatcatcttttttcgggctgatttagagagccataaccttgcttctaattcaagccggcaacatgaatggtcgtcggcagagtttggaaaggcatctgtactgtctttgctctatcgcactttcaccgatatatggcaagagaaggaggttacactgcagaacaaccagttgatgaggcttttactggctaattcggcgcacgagttcagaacacctctaaatgcgatcatcaactacctggagattgttctcgatggttctctagatcaagaaacacgagatcatatttccagatctcactcggcttctaagtcgttggtatacatcatcaatgaccttctagatctcacgaatacggaaaacgggcaaaagttgataaaggacgaggtattagatctctccgagaccctcacggaagcaacagacatattctgggaagaagcaagacagaagcatgtcgatctacaagtagtccaacacgcagccctacctcccgtcctcggagatcaacggcgggtacgccaggtgatcacaaacttgatcagtaatgctatacagcacacatctaccggagcagtgacaatcgagtcttgtgttgttccggagccgctggagacagatcatatctgtgtcgaagtcgcaatacatgataccgggtctggcatgtcccaacagactgtcgaaacattgttctgcgagctggaacaagtatccaacaagggatatatgcagaatcccaactcatttgaacatacttcaagtggccgtgtattcgagacggaaagcgtgcttggcctgggcctcgcactggtcgcccgaatcgtgcgcaatatgaacggtcagctaagcttgaagtctgaagaaggcaagggaagttgcttcaagatcaggcttgtgtttcctcttccgggtgaagatagtattcaaaagcagaactcgtgtgctacgtcaaacggacatgtgcagggggatgaaagaaaagaagacacaaagaaagacatcacatcctcgaattgcgtaacaaaccagaacgaagggggtattccatgtgaatgtggtcaaagtccagaattcgaatcaggaaaatgcgtcgtgcacgccgaggtaggcttgaaaaccggggaatcgagaaagctctccctttgtggcgaacagctcgatcagagccaccagccacaggtaccggccgctttccttccaaaagaagatcctgggcaatcatcagaagcgtccaaatctcctgtcaaagaactcttctcgatctcaccacccacaaaatcccctaccgaccagccccaaccccctcaacccagcgtctctcccacgatggactggaacctccacgtcctcgtcgcggaagacgacccaatcaatagcaccatcatgcaaaagcgccttgagaaattcggccacacagtgcacatgacaagcaacggcaaagaatgcctatctgcctataaagctgatcccacccactttgacgcagtgctgatggatctacaagtatgtcaaccaagaattaaacaaattccaactcaatgcacatactgacactcaatttcttacggcagatgcccatcgtcgatggccttggtgcaacacagatgatacgcgaatacgagcaagagctggctaatggagacacgcctgcgcctcgcattcccatttttgctgtctcggcttccttgctcgaggagaatcggaagatgtacatggattcgggctttgatggatgggtcatgaagcccattgatttccacagggttgatcggttgcttgggggtgttaggcttcagtgggtacgtcaggaggttgtttaccggcctggtgtgtgggaggctggagggtggtttgaggcatagacattccagaatgaccataggagctgagatgggggttatttcgactcgaagaactctgagaagggggtgaagatatccaatacccaaatcggggcattgaaatcatatgcaaaaattctagtctttctccatggtatctatacaaacagaaaagtaaatgcaaaatgcaacaaaataaaaacaaatgtaggtaaactcgtcatatcaaaaattttccgctatatcggtgaagtcaggcactgtatctccacacttaaacgaagggctatatgccttgcttggcatatatccattcttccatgcggtccgataactccactgcgcggctgactctgtccgccaggtccagtagaaccatcccattgccgtttcgaaggaagacatctgtgcctcggcatatgtctgaaggaacttcttgtaggtatccgaatattccgatgggtcctcgttcgcattcgagcagctgcacgttccttcggccgctgttgggcaataagccgtcgtggaagtggtagagtaggtcccttcccatcgagtacctcggccgacgttgttcaaatactgcgcgcagtcggtgtctgcctgcgaccattcaccacaaatggttggaccccatctggttgtgtattagcatatgagattacaaagagacggcagctcaatttaccccgaagtagtcgtgttgatctccttgatcatagggtaccaactattacagataatgttgaccttggcggtgtggttcaacacgatctcacccgtgttgaaagtagtatattgatgggtgtcgaggtacatgttgtccgggtgggtttggaacatgctgtcccacttggcgagattcagaaacccatcatgcaggacaatagtggcagtgataccattcttccggacgagttccgctgcctcctgggtccaatttaggaccttctcggtgggcagggtgagcatcagtggctcgttcaccagaccgtagatcgttaccacattcttatatcggtcttgggcaaagaactgcgagagttggttgtgaatctcaagcgaccgcttacggttgagcgtaccgtctgtaccggccaaccagccgatgctgccctgccggccgctatggttccagccattttgactgccaggcagtccgtggaggtcgagtttgatccgtagtccatatttgcggcaccactcgattgcgcggagtagataacgccacgcaatcttagggacgtatgggtcgtcgtcgtaggtagtcacggcccaataggagtatgggatgcggacgtgatccagcccggcctccttgatctcttttatatctgactctgagatgaattcggcataatgctgctcaatcgtggccgctgcggagcttccaagctttttagtcaaggtgtactcgtcgataataccagcgctagatggccacttgctgaacaaagacgggacaatgaagggctcgatagacagccatccgcctaaattgactccgcggatcggctgtgtgccgtaagggaaggccttgttaagagcaggcacattgtcgttcgcctgggcagtgtcatcccaagtcgagttgatgcccataagggaaaggccacccacagtggcatttgtgaacgtaagattgaacccttcggtctggtaccacgtaaatggatccaagtaggtgcccttggcgtaactctgaagtaccgctgtcagcaaattccatcgaggtgatacactcgagacttactggaatgcttgcgcggctgataccgtccaaattagaggtagtcgaactgttcccggaggaggaactcgtttttgaatctgagcccttgttttttgacacaacaattgcaaccgggatgatgatggcaagcaagaggagcatcgccaggagacatccgaccaagatacgtttcttcctcgaccagttagaccaaaatttccaagccggtggccctcggttgtccgagctgccttcccagctgtcttcatctttccaatgatcttgcacagcaggtccaccaccgccacgacgacgaacccgagcatcagagccatggccttcttccaaataagcaccagacacaactcgtgcgccggccttatggcgtgagtggccctgcgcaacttcagcaccaagtgccgcaccagcagcagcgtccaaagcagctcgcttccgctgtcgtcgacgttcccgacgcaagtcatcttctccgcgagacttttcgatacggtccacatcctcgtgctcagcagcaagacgcgccatagcgtccacactcaggaggtgcgcagcactactcgaagactcagtgctgcgatgtttcttcgccgaggccgcagcagcagcagcatcaacttcccgccgacgctccctttctctttcgcgctcgcgccgtctccgccgacgcgcctcagcctcaaggtcgagatcaacatccctggcccgtctatctctagccggactcgcactcgcactctcgtctctgcggtaccgcctctcgcgatccggccgtttagcaggcgacatagcaggtgagcccttcaccctagaactccccctctcccgctccctatcccgtcttctcccctccccagactcctcataagcaagtccagcctcttcctccctccgtttgcgcctctgttccctgcgccgctcccgctcctcgtcataatcatcgcgttcattatgcgagttcgactcgtaccctgcttccccacggaagcggtattttgcggtgcgcgcgttgccaggactggacgttgcgccttcgtcggtgtcctcgtagcggccacggatgtactccctatctcggtctcggcgcaagcgctcttgctcacgtgtgcggtcgcgatcccgatcccgatcccggtcgcgtctgtcgggtcggtctcggtctcgggattggctgggcatgccagatgggggtgggggttttggtgtggtatgcgctgatcgggatggggaatgtggaattattgttcgtagtgattgttgattgggttgttgtgaggtaagaagaggaaggggaaggagaactgatcggaatgtattgagattgggttggacacgtgggcattgaggaactctagccaagtatcttggaactccatctatatggggtcggtataagtttgttttgctttttccccgcacggatatcccgccaagagattgtataacaaggtaaaatgtcgttatgtagggtttgctccctataaagcccttgatatattattttataaactctgtacagctcacgtcttcatggtgtatacctactttgtcattctaggttaggatgtgtaaatggttgcggagcaacgggtgataaacgcgtccttatatatgtacggagtacggatgctccttatgtacactctagatacaaagatgcgaaagaactcatttgtatattgaaatgcaagatataacattaaatacaccaatcccagtccacatagacatgctccagtccattctaaccaaaatacaaatgttcatatcaacgagtcagggtatggaaactccaaaacactataaggttaaagaagacatcattgcgaagaaaataaaacaaaagtgaacaacgccgaccgaaaagaggagtgataaggaagaaacaaaacgcgggtctgattgtttgtgactgccataagtatggatctgtacagctgtaggggaagatggagacgtggcgatgcatcatgatggtgatgatatataaagaaagggatgaaaggaatgaattctcgctgtgtccggggaatctaatagaacgaaagtgagatggtgcctcgagcactgcatctcttgctgtaaagatcaacgcagtgaaatgcatagtcgatgtgcagtgtgcaatcagacagggtcatcaaggccgtctccctctggccgctcccaatagagggggagccggaacgtgtcgaagtggtggcaacccagccaagaagttagagctagcattcattcgccgacctccttgggtgctaaactgggaagcattgatatccaagccgggatttcaaacgcaactgcgagtcgaaaccacgtaggttagcacattagcccatattgtgcgggtatagattgtcagcagtgacagcgccacccgcacgagcgccaattggttttcaccgaagtcgggcctgtcagctaatgatttgtctggctccttctttgcccaggacgcctggctcagtcggcttgggactgcggtcgcggccctttttccgactgaagaatgatagcatgccattggcttgcttgttcttgtcatcgccattatccatcccatcggcgggggtagagttatgagccagctcactccagctgccagcttcgtttaggaccatttggaccccaccacttttgctcatttgccgcgtggcaccccggtgtctattgttggggggtagaggtcgatggaaggacggggcaggcggcggttggaagggcggcggaggcggaggtgaaggcgacatgcggcttgagggagacggaggaccctgaccagttgcggggtcattggggtcgggtgtctcgctgagtatagtcatgttgtcactctgttgggcgcggtagtgcgagccatcggcttggatgggagatgtatttttagggtcaggctgtgagaattgacgggcatgcgcaattggatttgccgggcttgtggtattcccttgggttgttgtggcaattggaaagcactcctcgggatttctgggacacaccattagcacatggggggaaatgggtttgacgggaagagaaacgcacattacggcagcaatagcttccgcggcattgccttggtagctagtcagggtgtagtcaaacggttcaaacattgtttcaatgagacggtgaagctcttcatcacgaatttccttcgcagtggcatcttcccttagctcagcgcgcggcttttgtctacgcgctctggcctccaagggcgcttcttcaagaagtagctcctctagatcgtaagtcgcatcaaagttagttttttcgcttgatgggcggaatactggtgggatctgtttgcgctcaagggcttcaaagtcgatctcggcgaagaacatgtgcgaggtgtaggtctcgaacccgatagcaccgattcgttgagtccgatctttttgtatcaatgatcccaacgccctcaagcaagctactgatactgcgggattggtgacgtagtatttcggctgcgccttcttgatgttttcgcttaaggtttcttggcttcggccttcaaatggtcgctgcgctgaaggttagacaggaaagtagacggaaaacaaatctctcataccttgttgtagatgcactcgtaaaaagtaacacctaatgaccaccaatctacctcaaaggcataaccagttccttcatagacttccggggctaggtaggctagtgttcctgatttgcttgtaagaggtttccccggtcggtaatctgatgccacgttctatgaattggagttagccgaagctcacaccagtggtgattcgtgccgatagaacttacaaaatcagccaggtgaacatgtccatcggaatccaacagcacgttgtctggttttagatctcgatgaatgataccctgcgaatggatatacctcagagcacacccgagttccgccatccaaaaccgcactgcatcctctgtgaagcattttcgggagatatggaatcgaagatcaccaccgttcattaaatcaaccacaatatagcttgaatctggtcagcaaggagtgacgatagtcaattccagaatactcacatgtactccatgtcttggaaactgtatcgcaaattgcaaaggaacggatggttcaaatgctcgagcattctccgttcacgaattatatttcgtacgctttccgaacgaaccactgaagcgaatgtcagctacagctttcccaacccggcagctttgtagttccaacaaaccttcctctttgcgaatatattttagggcgaatgtaagacctgtatccttcctttcgacgattcgtacttttccaaatgcaccctttccaaccacacggaggagccggaaatgattgaggttgactagcagagaaggagccatcagcatattattcgaaataatggaagtccctaagacgtcctccccgagtcgaggccagtaaacctacctgcatcgttgcaggacataggtttcccctgagtatttcccatgttgcgaggatagagcgatagccagagtaatcaaagttgactagtatcttgctagcaacatcacacttgttccaaaagtcttccggtcgaatggcgatcgcgtcaacggatgaaggagacagattttcggtgaatatcgagcttatctcgcaatttccatgagaggtgactgaattccgaaggtagaatggccaagcgggggggggggggggggccaaaatattatcgagcttatctcgcaatttccatgagaggtgactgaattccgaaggtagaatggccaagcgggggggggggaggggggccaaatattccaagagtcggcgaagattatcaatgcaggtctagatgtaaaatcccgagatctagacaaaactggatgaaattagaaggccaccagaactcttcaggagaaataaagaagattcttcgattgcaggcctgcaggagatgtatatcaggaaacgtgagggcccgggagcttagtcgcgaagcacaccgatttcgggttcgataaaccacgaaaaaaaaaagttggaggaaccaagttagagaatcgaagagataaatatgacaactgacaccaataccaagaatctcctgtccacttgctcggggaagtgaagcagagatgaaagaaaggggatgaagcgggtgagcggtctggaagaagccggcagtaactgggggccaatcacgcgtgacgcgcaagaaaatcggggaaagggggataaatgaaagaaaagggcttttagttctgtaccgacggagtatgcttcttctggtctgggacgccgtgcgatctacaccgtgctactactctttaagactagttgtgttgtggaagatattgatattgatattgtcgttggtctgtctcttaagttggatctacctgtgctatgaacaatgagactcaaatattccatagatatcacgcactcgctcggcgcatcgagttctacggaatatggttaggtggagagtatatactactactatagcgctggcccagttcgaccggcccgcttagattgatgagcggaggcaatgtatgatatccacagaatgcacagactttttcaattcgccagtgacttgtcacttgtaatcctaggcgacgatcttggcgaaccaaatgcagcttgaaacagggagctttgggactttagggggaaaattggttctatgcgattggggggctatattgtacaatacgatgtagatcgctatttaggcatttagcatgatctacgccttaaaaccctctctcttcatgagatttatgagactctgtgccacttaatttgggcttatctctcgggttctctgtctcgttctctttggaattacaatttagaatcttcccccaagtaatcgtatagttcgatcgatcgaaccaaccaggagatagcctagaaaccatgctgcaatcgactgatcacagttcgccacacgtgtaaaatagcctgtttttcccgatttctcgtggctgccacgttatggaccgctttaggccgaaatgcatggttgtctcgggaactgtcataaagaagggctctggaatgcctgtggaatattcaacgttcgatttgatccctcacctgcaaggacttttgtcggctgcagttggatcaattctaggcgggtctttttgcattcgctccactatggcgctgatatgctgaacacgtacgaatgcgtttgtctcccactttgactccctcaattcgagtactattggttccaccaaacttgacatgtggacgcagtcagctagtgcagggtttttgatccctagtcaaatgaaagaccagcagctagcaaccttagagggcgcccacggtaagcttataaaatggaatgtggaatgggtgaaccttgtcaactgggcgtcgggtaaaaacatgcaaaagataatcaaggggcggtttcagcctgctatttgactttcaagaaacataaacctgggataaggctgcttgtgatcgatacagattatgtatcaaatcatttaatgacaattatggtcttcagttacgtggcctctgtgttggcatattctctttcattttcagcacagacacaagacaagatatatttcggataattatgtttgtagatccctctatattaccttataatcataattaatacgctctaagcgtgaacggagtatctctggggaagataatgatgtattctctatctagctagtgccataggcggccggggtcacctgaccctgacgacggtgacatatggtagttgattaatggcttcatacaaaatgatacccaaattgcagtttatagtacaagtgtacccaaatatatatccgtgcactactccgtaggatgcaggaacaggaatggggtcttcaactatatccaatttgaacttcagccaaatcaggagactggctaacatggcggccattaccaaacttttctcgatccttttcacttgtcctattacttattccgattcaactaatttctttccaatgtaatattatggagaactagtgcacacatctgaggttgttggggtggtagatcggtcacgggatagctccttcccaggtttggcttcctcgattcctcaatgtcgctgccatttctcgttagaccttgtcatttcttcattcatgcaattatccccaatcattcatcatggagagcttcgaaaagtctcggccattgctgcagcgcccagagagctctagcattgacgttctagatttctctttcagcaagcccgcctcacacaagccctcgtactcgcgaaatctgatcaagcaacctaccattccccctcctggaattgacaatgccctatcttcaaaggaaacgatggtagaggaggcagggcacaaccatcaacttaccaggccaaacacgtatgtagatgagccaggctgatatcacggatgaacaccactgtccacgatgaactaacatgtggtattgggttcagccctctcaatcctcacagcgtcgggaaagaaggacccttcaagccgccagtccctgcgagacaacctgtcttttctcaaccaagacgactatcaacatcagctgagtctaacaaagacagcggtaaccagcctacagctggggatatagggaacttgggtttcggacaagaacaggcggtgatagtctcccagctgaacgagcccaccgagaccgatacccctaaagaaaccatcagccctgcacgaagggtcgtcgagtcgagtcaagagcgtgttgttgacattgagaggacgagtgaagctaattctgccttacctaagtcgccccaggtgccacatccccacagagagaggcaggacattgagatccaatattctcatgtgcctctcaaacctgtacaaaataagtctcaggggtcaaagcgacgacgtgcccctgagaaggacgcatcgtcgaagcagcaggcaccgctcattggtagcaaaaatggtgttcagctgaatgaggatgatctattcgagcttctcatcacaagaatgagacagcgagaggaaagcgagcaggcagtcgcagttatccaacggcaagtcacaaatgagaacatggccttgaaggaagagaaccttaatctgcaggaccggctcaataaatgccaaggacagctcgccaaaacatcatccgagtcaagatctcagcgcgcacaaatagaaaagtggaaggcgaaacttggcacattcaaaggtgtcctcaacgaactcggtcgtgaatatggcgcagtcctggaacaagccaaagaattgaaatcagccactatctctcttgatagagagaaaagcgagatccaaaacagtctggacgatatcaggttaagagtttcgaacagcgcagagaccattcaacaccaatgcgagagactttcaatttccgaggggacggttgccagcttgagggaagcgttggaccattcagagaaaagaggcgatttagtcaagacccagctatccaacgagaagaagcgaatcgccactctagaagcttacatccaaaatgagtctcagagccaattgcgaaacttggtccttgtcagaaatgaccagcgcaagatggccgaaaaacttgactctgcctatgacctgttcaccacatcttgcttcaaatcccaggataatatcctgtcaaaactgagtccggtgcttgaacactgtctcgcttcggttcaggggttgaaagagcagtgctctgccgagactttgaatgtccaggagttcaccatcagcgttcaagagactacatctcggtaagttccgtagaagtgtaccaaagaacaacacattttaaactcactataactctagtttcaactcattggctggacaggttacaagtgacgtcgaccgaggcacggaaatgagcaagaatgtgttccaagccctccaagaagtcattcaagccattgaaggcaacctcggtccgtattcgtcaattttcaaacagcttgctaatagcgagagttgctatgggagtttgcaacaaaagcttcagatcattgagcctatgctcgacagtctgggtggttctatcaaggccgtggggttaacagaaacagaccttgtgcgcgggttagagaacttcggtcagaagctttctgaggctcaaattccagcagggaaccctgttctggagatggagatcgccaacaaattcgctgaaaatacccagttgcaactccaactgcaagaaatctcgattgaggttgagtctcttcgaaagcaacttgccaacaaatcatctgaaaatgaacatcttcagcatgctttgaccgagactgttgctagtgaacaagcatctaagaatcaaaatgctcggctggaaattgagaagacggccttggggagtgagcttcaattactcgaacagagaattcgggaagagttggatgccgcaagcatcgaattgcagggtcagatgaaagctaaatttgaagaacaagtccaaggccttgagacagaaaaggcgaagctagaaagagacttcaacaacctccaggcacagcttgcaaatgttcaaagctctttggtaagcccaactgtgcctgacgagacgggttcactaacagtatgcagaccgaaaccgaaaagacagccgaggaggagcgactaaaaaaggcctccatggtaagcgatgcggatcatgatagtcatgtgctcaactgataggcgcagctcaacgaatcacagaaacgaatcgaggagctgaatgttgcttgttcaaaatatatcacagaagcaaaagccactgaggctgaatcaaacttattgaaaagctccgaagccggtctcctgacggaaaagaagagactccttgaacagcttgaacaagcaaaagtaaagaccaccgagcttgaagcgagccttgggctgaaaacagagtctgtagcgctgaagaagaaggcaatacaggatgtagaaaagagggccgaggtccttcagcaggagacggcccagaaatccgaagagcttgcagcaacaaaagaaagcctcgccatgctcgcatcacggtcatcggctttggaaaaggtcggggaagaagctgatgctgaaataatttcactcctccgccgggcccaggaggctgaaagttggcaagcgaccataagagaagggtttgcgaaggtgattgaggtacattcagacgagccttttgagcaaacatggcagaaaatagaagacatcatccagtcctcgcttgttccgtccatcactggcgatacgtcttgcaacaagcctcatgataccgggaatatggaggacagcaatcttcttacactcgagtcaagagaggggaaacatgccaatcgcttcgcggccaatgaatcaaataaggggcctttcaatactggtgaagacatgcagccagatggacctctagcaccaaaaagttttagcccctcgaaggctttgaaacagggtgattgtgctgaatctctaccgaaattccctgccggtcatggccatattgttccgttttcaagtctgcatgacagactttcacgggaaaatagcatgtcacttttcaatgacccagctgagctcgagatgctcttcatgtcgactccagatctcccggaagcgttggtgccgaaggatgcctccaagaaagctcccgaataccgatctgttccaggagatcatctgagactaagtcgagatctcaatgacctaaaccctgttctcgggacacaacctcccggcgccgatgacaacagaagcgaaagaccccagtcgactcttgaaaatatcgacagttcgtatgtggataaacatgccaaaaacgaacggcccaacaccaagcgtaaagtagtcaacttcgagggggcgcgttttatcacccaaacagaggttggcaaagctagacgaatgtcagatgcaaccgacaacagctctggaagagagtctgaaagtaaggaaataaagagaacgcagaaacggacttacagccgtcttcgccagtctgtggcacaggaggagacgggttcaattgaaacaactacagagatgcagcctgccaacaaagctttggtaggcaaatctcaacagagctcgacggataagactgagcactcttcgaacgcgaacccaaggccgtcgaagagagcacgaaacgcaaccgacggcccggagcgacgactgagtccgaagggtttggcttcaggtagcagcaggggaaacacagccggccaagctagcaatatgcgaggccgaggtaagcgccgcactcgaggtaagatacccaatgcctctctctaggatagctctagctaacgattagaaggagaccgttacagtcagcgcttcagtcaagacgccggctgagcacttcagcgtgagaccggagagaaataccatttctctattgttactctaaccaagttgagcaaattctccatattcactttatcaaatgcaaggtgtgtgcgacaagtccatatatatccagatactgggttagaaagatatgctgttgtcatggacggatggacgaaaagagccccgggcaaggcgcatgcttcggaaagcgatgaagtggaatgttgttggatatttattgtagttttattgaggtacccaaagctgtattgctcttaacgccaaacacatgctccaacaaaaggaggtttaccgcagaagatccgagaaaccggggaaatcacaatttcccgcttgtcttcggtaaaataatgtacacataggggtcgttcccctgacacccttatcgcatttccctagatacgcgcaaagcctgaaaaaccgttcgacggcgtatcgggataggaattgcaaagaaacgcaggctcgattggaggaggaaaagaagagatcgaaatcgaagtcgtcatcgcggtcgagaagcggatgtttctcaaggcgcagaacaatcggattgaaaagaaaagccgagcggaacccatatccagaatcgaatagcttatttattctttccacccttggtcgcctcaaggaaaagcacctgcttcttaacgacagggtcgtacttcatcatgctgagaggacgatggacacggggccggatcatcgtgcggtagtagcccgtcatggccatagaaatcagccggacggcaatggtacgggacttcgctgtgccgggaaaaagacgacgttagccatcagccgcaaaggaatccggcgggttctcgaatttcgctcccagcgcccgattcacatcccaattgcttatggaatggcgggtggatcatgcgattgaactctcgggcttctcattccacgtacctttcttggccatcttgggcggcgtctcggtatgcttgatcgagttgtctctctgaaacaatttcgaggtcggagttgatcgtttcccgtcggtcacgtggagcttgcttagtcattgctgtttgggccggcccgtcaagttagaggatcaacccgtagacatctcgttggcggattttgatgattattttaaagttgctaggcaccaacgtgtgaataattattctactatacatataatccggggcttgtaagactgattaaattacccatcttccaccgttttctgcaacatacattagatatctcgtctgggacctatggatggactagtcctgccacccccctgccaattcatcttggatttctaattgattttagtcagtataataacataggattacggattactctgtactatgtttggccacctgttaatattgatcttccccgttgaactcgccaactcaatacaagctttaaccgctgcctaggtgacattagtagtatagatttcctatatgtgggtttgagctgtctattcaagatttttcattatgtttgacctgtatttccaactcagaaagttctagctaagtttgcatgagtgtcgtttacatcacagcatcgccgatgtgacgatatcatgatatgcaatgaccttcagagctgaaaatcttccttcagttccaatttcccgatgataccaaaaatcgtggcctgatattatagctattgtggctgaaaaacattgtatttggctcttcagagttagtatgttttacattttacaggactgagagatcaactgcatagcgggtgatatgagcgaggtagtgattactagtcgctaattgatgatctttcaggaaccaaaggttgattaaacagcgcaccaaacccgaaaacatattatcaagatgatctatagccgctcgattccctttgtcctttttgccttgtttggcacaggactcacgcaatccgtgaatggcttcaactttaacaagccaaccggcggccctccaggacgctattttgctgctggctcgtctatccccgttactgctttgcagagcgctgctgcaacggctagtactgctgtacccgatggtacctatcctatcaatagagaaaatggagctcaggaagttaccatccatagcgactgggcgaacttcaatcaggtagatactctcactagccggctacttgcaggatcaaactgattgataatagggtgcggcatatgtctggatcgcggatatggatgtcgactgcgacggtattgactatatgtgcaaggtaggtgattattattgtctgtctgggatattattgctaaccctatggtgcaggaagacgcggacggcctgaaccaaaccaactttggtgctttggctgcctatgaagtgccgttctttgtgattcccgacaggttcggaacccagtacgcaaagcagcttcctggaaataacatcggtgcagtgatctggtatgactttccttctttggtggatatttcagcggcttcctgttctaactaaaagctagtgacggcaagatgttctacggagtttacggggactccaatggcgctaccccccaagttatcggcgaggcctcgtggttgatggcccggacttgcttccccaatgataacttgaacggaaacaacggccatggtgatgctgatgtgacctgtaagtctgaaaatatatatttcttttactttggcggctactaatccaacaagatatcatcttcactggcaacaactcggtactccctagcagtgctctcaacacaagctatgtcaccaacttcagcatactacgctctatgggcgacaggcttgtgacctctcttgcgcagaacctcgggctggtaaatggagggtcctcttcttctattgcaacgacgaccgctggctccagccctactggaggcttctgagtgagaagaaaattgtgctggtaagtaaccttcagctcatattcttacttcatggtcactaagtaattttataggtgcctcttgcaagaccgagcatggcagtcaagtggtctggaaaagtgggaaatgcacgaatgagtgattgcgacctggtagctatgggggatttgatctaaagggaaagataatataaatggcagagtagctgtatgtaccgtactcttgaccaccgcgattttgccgatcggggtatcttcgctctatggggtatgcttaataacgttcaaatactgctttaagtgtatactcgacgattactagtgaacgcagtatatcatagacaggagcaaggaaggcgatcagtatgaaatgtattgagtgaactggagaactgactcgggcaaaagagaacacattttacgtttactcctattgaaaatatataactgtgtgaacagactaaattgtatgatttgtattcgatgtcacttactcgttatataggctcgctctattacctttctaatcaacattgaactcatcggtccaccattggatcatggttgatctgacctacgctctcgtcttttgaagtccaacatttacctcaagatcttcacccttgtccaatactctagcggattccagtctttgccccaggtagagttcacgagtatttcaacccccacgtgctgctgtcgccggacggtgtcttcgttatgtcctcatccacggaatctgcgatcctgctgttcaggactgatgttgtcgagtgccttggattgagtatctcgatcggaagtaaatgcattgagggccttatgttagagcgagactgtttgctaatgcggcaacaatgaaatcgcatggttcagcatgtgtgagttaaggcgcgaggtcggtggatgaatctgtgttggcagtgcctttgattgggaattgaccaaggtcaggggcataggcatagagtctaagtcgttccagacctccaacatcaattgcctactgaatatgagtcattaacatcagcatagacgatgagatgtttatgcaaatttcattgcccatcgatccccgttataaggtcatgagtgacgtgataagaatagatgggggttaaccgtgtcacaagcctccaatgaagtcgccaagttcggccatcgtgccctgaccgttctatgtatagccgaatatggagtaaggggtaaaatgttgaggagaagtcctccaatcatgtgatagttgacgaaggcgtgcttgtttgttgttgcggtcacctggcaagtcacctgaagtcacctgaagtcacatgaagtcacctgaaagtcaaaatgcggggaatgttcggcccgagcagccaattgggcaataatgcctcaagctcctgtggcaatgacttcattgtctgcaatttctgcaaaggcgcgaaaatagaacatcctattaaagaatagaaacgtaaatgtttccaggggtcacttgatgcgtttgcgtgatattacctaaaacccggtttgcgtcggggaactactaacttgattcagctgtgccttacgttttatgatcgaatctgagtctagaagcccataattttacgtgatttcccaaggatcgccaagtaattgccgagaattttgatatcacgcttgcagcgtagttggagttggtccgaatggcgttataatgatctacccgtggacattcccccgcaaaatctatataagagagatgtttccccggacttgagccaacaattcaattcaattcgattccacgcaatctccatctgtcttaccaccttgggtcctttatcctactcccaactacaattttatgtgagtaatataggcatctccctatgtctgacagttactgatacaatcctcagtcaatgacccagagtcaatcctccttcaccatggctatccaactacagcgccaggaacagagcttgaaatgcgagcaatgcggactccctgctgtgagcttatccacaagcccaagctccaatgatgctggcagtcaggcatactacaaatgtgtcccatgcaatcgcttcttaggcccttgccctcgcaacacatcaggagctagtcagtatggtgacagcgattctgaatcatcaggctcggaggaccatgtacctcgcggtctccccatcatttctacgaagaagcaaaagtccaacccacacccggctccggagttcgatgaggactgggaggcgaattgcagtccaggcttcatggtctcgagattcaaggcgcaaggcagggaagtgcttctctggccttgaagaatgatgcattttggttttttttgggaatagcgagcattgtttcatttaccaagtgtttatactcggtcgttacctgctaaggtgacgataagattcgagtaaaagtttatatatatcactaataaggctatgcctttgagctcggaatacagaatgtttgggtacctgcctatcagcgagattcatgaagttgcaaaatgtttacttctgggaaaacaaaactataaatccttcaacttcttttaaaagccaagtctttacctcaataagcttattccttctagagattctgaatattgctataacctatgacagattttctgggttcaatagcttgccaatgatctgaagctacagtcgcctacagtatcaagggcatcatcttcgatatgcactcagtacctctggtcatcgtcagagccgaaaatccagaaagcttcattgagctctgtatcccagaccatatcagcgctctcaaaacgaatttatattcaaacctcttgattttaactctttgcctattcgttcaaacatatttgggctgttgtcttgagccgtcaagtttatactcaaaacttattcaacgcaatttcatcatgagtactttcactttgtctcccctccatgaatattcatttgatctgcgaccatgatctctttctctttgctagatagagagttatcctagtttcaagtttcacctactcacctctctctcacctcacctcacctagcatcctccactttgtcaactttaccacctgcctatccccatcttcttattagtctaatcattttttgatcgcccagatggaagacggtacaagcaacgatggcaatcatttgcccgaatcacaccctgatacgactacaacctcgagcactcctaccattcccacgccctgtggtataggaaaaatatcaatcgagaacatagctctgcccgaatcaatcatcatctacttgaaccaggattccagcaccttacagattatggggatgctggacaggctgggcgctccagcaaaactaccagtcatccaccgtgcagcaagtcgacttgaagctctagctgcggtgtgcaactcgaactttgcagctagaatactactgcaatcaaccaatggaccgatttcggatatagatgccgtagctctgtgggcacaaaccatgcctgagctaccgcagccatccgaatattgggatgtcgtgttagccttcctcttgtcgaaagaggattgcatggcgctgcgggacgcacttcgattcgcagcaggcttacaggcattcaatgaatcactccaggagctagaagatggactggaaaaaaggctcttcatgcagctggcggataaatggtccgcgatgatttcagaggaagacagcatagaagacacggaggatgatattgaagacgacgtggagtaattctcagttggcacaattccattagactatcgcatttctacaatttagtgacctctccacgcataatcggttcatgtgtaactgtaatcacagtgtcttcctcctcgcttccttgttcctctgccatcgttatctttctattactccttttctccatgatcataatccaagtgacattaaacaaatataaaacactgattatcgtggcctataaagaagatgactgttagttcataagacgtgacaatgctgagaaacaatcatacccaaataaatcccccactacgaaggtgtatagcggccaacagccggatgcctgattttaatggttttatagcctaattaggactagctcttaccaattttagaccggcaggaaattaaaatacctgaattactatgacagatctcctagtaccaaattgagaacagcttgaaagttgaaacatgaagctattcatacccccccccccccccccccccccccccccccccatctnnnnnnnnnnnnnnnnnnnnnnnnnnnnnnnnnnnnnnnnnnnnnnnnnnnnnnnnnnnnnnnnnnnnnnnnnnnnnggttaaaaattggaaaaagaaagtttgcataccccccccccccccccccaaaatactatttctcatcgatcctaggcgttaaggccctccaactatatgaatctcctgtatttaaagccattcatacccgccgtagtcccgcactttcccggagaaaagctaatagcgcaactgacaccaaggcccaaaacggttggaaagccaagcctggatttcaacacaaagtccccattcctaccgaccgtataaacttcaaactctccgtatcctctggctccggcgtggcgaatatttgaatgtagttttgagaattaaaataggtagaaggcatttgaattaccccatggtaacagtttcgtctcttcgatgtgtacttacaaaagatggtattgagcggtgtcaaaggcggtctaaaactggtaagagctagtcccaattaggcgataaaaccattaaaatcaggcatccgactgttggccactatacaccttcgtaccccacggaaaccaggtgcttttgacacaggccaagctaccaacggcaccaccagactagtaatctccccaagacaattgtaggaagcaaaagtaatcgctctgacctccaaatccccagcaagtccctccgcagtccaggcgatcagtactggaagtgtcccgtaagaccatcccactgatatataagcgaagaacttgagaccatcggggatatcccaaattgcaagtaccaggttcgcgaaaatgcatagaatcccagacaagattataggctcagagcgagatccacgaatgtcagagtagaagctcatcatcaatgcgccagctaccgccgcgccattcgtgacagtggataagttgttcacaagagcgacgggatatttatttggctgagagtcgagccagagaataaatggtgtggcttcgctgtatgtcatgttgcagaagatgactagaaggagcacgaaggcgtagaatcgccacgatgtgaagattcgtttgatgattgttttgttgagacctgtagatggcttgaatccttcttcctgtagtcttttgttggcgagggctttttgttctgcgcttaggaagcgggattttgtgcgctctggcatgtcgggaaagattaggaatccgctgtgatatgttagttggatattagagacttttagggacttttcaataattccaattgcttacatcaaagcaatagggattgtgataattgtgcagataatgaaaagccatctgatcatagtaagtattggaatgcttgacatgcggtgggaaactgacctccaaccctgtaaaccatgatgattgttgagatgtgtatatgcagcagcttgtagatatcctgcaaacatctggccgatgggatttgcaatccagaaaagtgcattccgacgtcccagttcttccttcttataccatctgtacgcgcaagtcagcatgctttgaatttccgatagtcgggattcaacacgaacgaattgactacatggaccaagcccacataacatgaagtagcgctcaacccgacgaaaaatcgcattaccactagctgctcgtaagtttgcacaaacgccgttccgagagtgaaaagaccccaaaagatctccgcagctgggaggtagtattgcgctctatgggaaatatcagctggaagttttgtatggccatttacttaggttgcttacgggtatttgatcaagaccatgttgctggggatttgaaacacaacatatccaacttcatctggatagcaagcagggttagcacaacaatcaaactgccgttaattcattggagacaatagaaaaagggcaatgttcttacatgcagcatttatataattcaatctattccccgacagatcgagatcctgtttcatgccagaaacatatgcattagctattgaatgtcagtcaatgattctcgaaacatgcatgtgaggtacacatactcaatgccgaaacgtctagatacttgacaaaaaatgacaaacaggcatatggaagaaccagccaatccaactttcgaacaagttgacgttctaccaatggcatactggcagggaaccatcttgtggcgctctctatacgtgagactaagcccgccattgttccgaaaggatgtgaaatcttttcgaacttggagaatcaatacgaaaccccggtctttgtatattttaacgaatatcatcttttgcatagatctaatctcgcgtcttttgtgagatatgaggccatatggcatcatacccctgacacgaataattgtcgccaggtaccgatatgttgattgcgccatatatcactaaaacaacaccacgagtatttcaaagcagactcaacggactcatatttcaatatctgtactcaattcaacctgtcggatgttttggcaagagtaaatgacgcgatcccgttgtagacaacgtattcggacttcttccgctctagaggggtagcaatgcttatctcgcttggcgagaaggcattctgatacgatgggttgagtattcgtgctttcttatagagatgacagcagatgagggttgagcggggttgctctcagctggagagataaataatatcgacatatagcgatatctggactttgaaaattgtcagagacatttgatctaaccgcatatatctaaaataaaatcaagtcttgagcttgataattttgaaatgtcagctgaaacctcaccacccaagcggcggatatacctcaatggcttcgacatgttcacggtaggccatctttccttcggacagtggaagaacccttccgatcggtcagccaccaagcgacgcgacctctcctactggacgaatctcgcccagatactggagaaaggcgatttcaatgcgttgttccttgccgacacctatggtctatatgacacgtacaaggggactgcagagcccgctattcgaaatggagctcaatatcccatgggagacccttcgatagtaagctagctgtctgatttttttcgatccagttgggttgctcatgatgtatcagccaatctctgcaatggcctcggtcaccaagaatctagggtttgcgatcaccacctctacttcatatgaagctccatacgttgtggcaaagaggttctcgactttagatcatttgaccggtggtcgattcgggtggaatattgtgacctcgtggaaggaatctgctgcaaaggccgtgagtattcacattggaggatttttgcccaagactgacatctatagctgggattgccactggtagatcacgataagcggtatgaaattgccgacgagtacctgaccgcattgtacaagtaagcaacagtgaaccctggatagccatacgaattactgacctgcaatagactgtgggagggcagctgggccgacgatgctctccaagagaatgctcaaacaggcgtgtatgccgacccaagtcgaatcaaatacatccatcaccacggcgagcattttcaattcgacggccctcacatcttggatccatccccgcagcgcacccctttcctcttccaggcaggcacatccccagcgggcgtcgccttcggcgcgaaacacgccgaaggaatctttgtctccgccccttcaccgcacatcctcgctccacgaattaaagccatccgtgaagaagccgccaagctcggccgagatcctaaatcagtgaaagtattcgccatcctcacgccgattgtaggccgaaccgacgaagaggcacaggcaaagtaccgcgaagcactagagtacgccagcgaagaagcaggacttgcattcttctctggtggaagcggtatcgatcttagccggtttgatctagacacgcctattacaccgtcagatgtgcatgttgacgcccgtgttcattccacgatcaatacactctcctaccagagtcccgacgtgcctgaatggacgccaaggaatatcgggaaacacatctcgattggtggggctgggcccgttcctgttggttctgcgagtaccgtcgcagactttttggaggaatgggtccgtgtggcggatttggatgggtttaatattgggtatgtgcagacgcccgggactttcgaggatgttgttgagctcctggtgccggaattgaggagaaggggggtatacgcgccgttgggtgagagtggtacaatgcgagagagggtatatgggcccgggcaaaggcgcttgcgtgatgaccatgtcgggaagaagtacggatatgaggtgtatgatggccattagtctagtcacagggtggaatgcaatttagattggtctaatttgaaatgatcccgcgaaagcagatagatacatggatatacgtagtcgaggatcagggattttataccggatttgatgaattcacactcatttccactacttcgtactcaaacaaagaatgtcggagatcaacatagaaagaaaacagccaatttaaccctaaaaaagaagaaatgactctcagctaagccctcaggaatgtgccaaggcaaaccggagagatttcttccctcgcgccagctgaaagactctcccaccaaggggctggaatccatatggccaggtgaagatctatataattggcctgattctattgaggcttgacgctaatgccattagaatcgggtattttggacaatttcactgccaagtggattcgcacatatcatttcacgatgcacgtttcctgagattgaaattgagggcatattgacttcaccttagcgctttatagatctcaccttgtgtcaaattaattaatacgagaccggaaccccccgattggagcgaaaccattgcatcttgaactaaatcagcagatggcatcagttcactcgcagggggaatctccacaactggacggacaacatcgaggcgtttcttggcggtcgtttcatctttcccgtactcctccggactcatcctcctcaatttaatctcccatttgctttgaggcatcgctttgattggtccgatctgcgacagaacggggtctccaatttgcttggcttcgtttaacgtccccccgctagtggttcggtcagctcaggcgatctccagccttatgtctccggttccaatgtggaaatctgaaacagccccgatgcagggtatgcgccaaatacttctcaacgccatttccaagggagctataagtactagacatctactcatgatgttccccattctatcttcaccatctttcagtcgttccttttcctgacacttgctgggttcaagttgtctatcccttcatttctacacacacattcttttactacactcctttcaacttcaaccgattttaccaaaatgatgaactctacccaaacttccggctggcaggtcctagtgaccaagagaaagctcctggtatcctgcgttctgggcctcttcttccttgccatcgggatggacctccgagcagagctcggagctggacacaatcagaagaagatcctcaagcgtgacaccaccagcactagcgatgccaccatctggcagcctgcggcaggagtcaagtggcaaattcaacttgtcgacgccgtcgaagacaccagcgtcgatgccgacatctgggacatcgacctcttcgacaacaccgccgagacaatcaccactctccagggcaaaggccacaaggtcatctgctacttctctgctggcacgtatgaagactggcgttcagacattagcaagttcgacagcgcggacttcggcagcaacctcgatgactggccaggcgagcgctggctcaatatcaagtcgaccagtgttcgtgcgatcatgagctcgcggctggacatggcgcaacagaagggctgcgatggcgttgacccggacaatattgatgcatatgggaatgagaacggtctcgggttgacagaggctgactcgattgactttttgactttcctggcctcggaggcgcactcccgtggcatgtctatcgggttgaagaatggcggtgacattattggctctgttattgataagatgcagtggtcggtcaatgagcagtgtgccgagtacaacgagtgtgacgtctatgctgccttcacggatgtcaataagcctgttttccatattgaatattccgacgagactattgagtcggatagctctgacgatacttctgacactgccaccacgacttccactgatggcaaggctaccgccactgcaactgccactgttgctgtcatcccttcttctacctcagctaccgccgccgctgcaacagccactagtgtctctgtcatccctgcttctacctcagctaccgctgcttctgcaaccgccactagtgtttctgtcatccctgcttctacctcagccgccgctgccgctgcaaccagcacggccgctgatgacaccaacgatgatgatgaagatgacgaagacgacgacgaagaggctagcaccgataatactaaggagaaaaaacaccgacacggtcacggacacggtaaccacaatctccgagctagagccgttctctcctccactttgaaaacatcagcttgcaacgcagccaacgccggcaagttctccactgttatcaagaacatgaacctcgatgcctgggttgaatattgctagactatcgattcctcgggggattgcttcgtatggcaagaaatcaatatgttagctggagatagtcgtgaataaatgactgtcgctattgtatacacttcaaagagacatcttagaatatatacaagacaagtgctacaattgagaaagaactcttgtctttattattggtctggtttgatgcgtagaagggctcagtactcagtatattgatgatgatggcgttgttctgtaggaggaatctcggtccggtggactaggctatatctaccatgaggggtcgcatacatagatatcagtcaattatcttcctcagaggacatcgcactttaacactaggttactcaactaagtaaaccctcaatattgcctgatactctggactgctttccacgcatcgccgctcaacatgacactacatgacgagagctctcaggaaccagagcagcttcctcgggagaactgggccatcacgccgagtggagaagggaactgttagatgtactaaggtctgttctgcgctgcgagtgcgagtgcgatgctgggcgccaggaataccggaatacctggatgctatcaatgtcgatgtacctatgtctcattctcaaactccactatactgacaaaagcttaggactacgagccgctaccaaacgtaaacccagcagtctccaggttgcttcatgcctcagttgaaatcgtccctttgatcttattgtcaataactgtcagagattctgcactgagattctgcagcgtcttgtgaacaatgggatggatagtaaccattctccagtacatgatccctccttacacaaacaaattctcagaaaccataaacttctcgtccctagcattggtttcctccggaatcacattagcatcctgaacctcgcaccccttcagcacagatccacgaccaatctgagctcggcgaccaatcacacacccggttaattgagccctagcctcaacaacgacgccctccatcaaaacgcaccgaatgatgcgggcagcactagcaatctggcagttcgcaccgatcacgctctctttaataacagcacccgatgcaacaattacattctcaccgagcagacaatccttctttgtaacgttgctgggcgaagccacgccttcggggtaggcaactttatgggcgtgtgctagaggcgacgccgccttgcgaccaacttcctcgatagaaggcagttttgcgaggaaaagggatgttgaaagcaagacgccagtgttatcgacccgtcgaatgaacggagttgatcctcggtggacgtaggctagaatttgcggcagttcgatggactggtgtaattgctctggctggagttcgcagctagaacgggtcctggtagtgctcatatccttgatgtcgattactttgtcaacgaatgcgccagtatagctgctttcaggcgtaatttctgtctcctgggtgaaagtggtgtcttcgttgaagttcttggtcaaccctagtttggcgccgagacctttctgccatgttgacttggcccaggcgccgaccagatcctccctaacggatttcagtttgctttggtggtggactaggtctttgacccaataggggaagacgtagacatgggcatcgcggaaggtggtgagtattctgatgcgcggacaattttggacaagggaatggcgaaggagaaggccttggtcttctttcattttctccttgattgtatccattggtattgacatgagaagtttggataaactgaaccgtgggattaacggtccatcggggccgtggacaacaggttcatcattctgctggagtggtgcaatagctatgaaatctgttccttctgcctgaatactctcctctcggtggtctgtttgatagtacacagccagaccaccggggcgagcttcccgctggcgatcgaagtaggaattggttggaggggatgcatgttgagtccctcttgaatcactaccatcgttgagggcatacggactggaaatccacgcctcgaggattgactcaccggggatttcacagatgaggtcacaaggaaggagaagaaaattcgtggtgatacatctctggacttctgggagacgaaggagctcggcagttcccattgtcatctcgaggtccttcggtgcaatgagcgagaccgagggcgagtagaaagatgtaagatatgggttctggtccaaagcagcccgaagggggggaaaagacagtggaggggtgatcaacgtgatatctgggatataattagccaatttgattaagagattgagatgggtctagaataaagagagcattcgggcttaccagtgacacctgatcgcctgcaaaagtcgatggcatagaataacataggtctgtttgcgacttgaatgagacactttggatactcctcaggtgtggaggtgaatgtattgagtgaacctccagggccacataggatgagggcctggaagtccatgggaccagcatgtggcatggttgtctgagtgaagggttaagcaagtgaggttaagaggtctttaaaatgtaattttccttgggatgagcgatcaatcgcgtgacatgtgtaagacggagagattgttgagaagtttggtagagggaagacggttcacaggaagagctgatgggggcagcctttaagagacaacaagtcacgtagttgcaattgaccggtcacgggtgaaaaagtctgaagttgtttgtttcataagtagccaaacctctgctccatcgaaatagataggtacatgacgaccgcctttcgggtggtcggtcatatcgatattgagttgtcaggcgggattaagtgaacggcaagactcattttgagtacgaccaagcattgatcttagacgatatagcttcggtgcctttttggtgcctttttagtgggtttgtaatagtttaacactctatattcaaggcttttatatgtccacaaccttcactcgcacaatgttttgccaagttctattttgctggtacccagagctatagtttgatattactaagatataaaactatttcccagttgatacgatttcctagagtgttgcagttttcaatcaaaatacaatatgggccgagtttatgctttgccccaaactttacagaatcagtacctgaaattaatgagctgatttggaaagaaaaataggaaaaggcaagaaaacagactaagcttttttatcaagatactggctctatatgcgttggttgagtaaaagacataaactgacgtatatagatcctcttcatataaatctcaagtgccatacccagaacaaggattgtctccccaaccatcatgcatcttcttcaatctcagcggctaattcgttctttcgatccttccgccagacaagccaccacgaagccagaatgcccgagatagccgcacacaggaagcaaagacagataacatatgacactcgatacgtcggtccaaacaccgtactgtatatatgaggcccagcgatgccactgaactgggccatggcattcgtcagcccaatacccatacccacggccactgtaccctcaagcgcacgaatacgttctggccagatgacagggtatgcagatcccgcacaagcggtagctacaatcaaagcgaggtatttgacgactgagttcttgactgtaatcaggatgatatagcagatgattgtcgtgctttcgactgatttgttgtcagtaggaactccatgtgtaatgcgggaattaatacttactcgcaacagcggtggtccagggtctgatccatcctttgtgtagtaaatacccgagaatattcaagaagaaaaagcatgcgacatatggaggctattgagtatgagtccggttagcgatgccttgcgtattggtgtgtttccctagattgattccaactcacaatattcatcagctgtgatagagcggttgtggtaaagccaagctcatagataacagtaggtagagcgtaattcactccaaatccgccaatgccatgtccaatccagtagattgtgaatgtgtacagggtcggacttgagagaagtgttttgaagtccccccagttccagcttttatcatttcctgagggtgctgtagaggatagacggcccttgaggaacgttctctcttcttcggtcaacattcgggcggtctcggggtagtccggaagaccgaataaagctaccacagatagcacgattgccggaaggccttcgatgacaaacagccatcgccagcctgaaagaccaccggccccatccataaagctgatggcatatgctagcagcccactcaatgcgccagatatttgaccgagagagtagaaaagggctatcctccagcgcagctcagatggcttgtaccagaatgccatgtggtagagcacagaaggatagaaaccggcttcagccagtccaattgcaaatcgtacacacatcatccccggaaagtcctttgcagcaccagcagcgcaggcgcagataccccagcccaaaatcaacacgaacatccatctcgaaggcgtggcgcgtttgagaagaatggtgttggtgggctcgaaaaagaggtagctgtaggagaagatggactgtgtccaggaccattgtgcggcgctgaaattgagctctttcttgattccagtgccggcttctaggttgatgattgcggcgttggagtagttgttggaatcaatgacacggaagatatatacaagcgagtaaaacccaacgagccagaaatctatttttcgtatcactctcttctcgagtttggcgttatattcattgtcttcgcgattgatctcattgggcggagttgaaggtatgctggaagtaatgacttccagctcgtcgcggtttcccgaagccccatttnnnnnnnnnnnnnnnnnnnnnnnnnnnnnnnnnnnnnnnnnnnnnnnnnnnnnnnnnnnnnnnnnnnnnnnnnnnnnnnnnnnnnnnnnnnnnnnnnnnnnnnnnnnnnnnnnnnnnnnnnnnnnnnnnnnnnnnnnnnnnnnnnnnnnnnnnnnnnnnnnnnnnnnnnnnnnnnnnnnnnngggtgtggaagttatgctgaaattaatccctcccagctcgtcgcgcttctccgaagccatattgtcaatttcaagatccgcttgatataggatgattgcttagaataatttcatctcattctgcagtcaaaacgcaacttattttccttgaagcacctttatgcttatgtgttacttggacccctccgttctcggcgacgcgggttattagggcaaggtgccatgatagtttggatcacgacatttcccctcccaatgtgaatattcgtttgattgaacctccattactcattattcattcggattgcggcatgcatagtctaaatgctataattgtggggtatggatattctcataacccccataagcttgacgcccatcatatataaatggacctcaaaataagagactaccttgaggtaccctatggtatggccttaataacttgctctgtactatttgatttttattgaagcagtcggtttcaatgtgtaactatgaaaatctaaggctcgcttaaggttttgcagagtatgtacaaaagcactcttactgacaaatcagacaggttaactagaccactgtgctgaccggaggcgacaaaaatgctcaggcgttgaagacctactctgcgattgtccaatcactggggtttttattatctcggggccttttggtggcttgtctaagctccatgctgagtggaggtggtctaaccggaactgtagcttagctatgccatttcttggtatctccgcactgtagccactcttacccactcatatacgtggggtccgaagacgtcttctgtccgcagccgttctggcagccttcgattgcaccaggccattcgtgatatccgccccgcttattcctgtcatcatcttgctcgtttggtcgtttaacgtggggattctattttatcaggagcagtgtcgtcgtgcagccaaaatttgttctttcaaagatgtagaaggattctagcgatgcctggctccgtttaatagtaggaaagtccatttggattggggcggtcgtcggatttgcaaatccctaggagttcggaggtgaaccgagcctcgtagagatatgtttcaggtcaacctgaccctttcctcggattctttcatttccagacgctgtctcatccagtttctcgtgctagctccttccgtgttctgatattcagtatgaggctacgcatgacagccggattttgccttgaagaaactagtagtttcctcgggtatgagtttaatgatttttgtatgaactcatggatatctgacaaggctgctaatgagaaataataaagctgccctcagatattttcttatactaccaaaggataggttgaagagaaaagcagagcactgaaggtagcccgattaggtcaattgtcgtggcgatcacaaaaccctcgtaatggaggattgcacaaacattgacaaatttggtctatcagacatgtctacgcacattcaaatgtgatacacaatccacggtctcaaattctattctattgagtcagagtttgattgactagttaactatgattcgaccccgtttcacggcacgataataccgttgcatataacgccatcctgagcgagcatgataccataaaccccgcatctttggaatagcaaagtgtatggcatagagcactataagagtacattatagataggttttattttgaattaggtatacaagtatactcttctcgcttaggatatcatccttcatccctatcctaaaacaaatatggctccctcagctatagaacaacaaatcccaatcgaaaaggccaccatcaaatcatggagccgacctgcgcctactaacgagaagcttgattgggcaccactagttgagatcgatctttctcgtttcgacgaacccggcggcaaagaagatctcgcaaagcaattgtacgatgctgtgacacgagtcggattttgggtagttgtcggacacggactcgatgacgagcgcatcctccgccagttcagtatcgggaatgcatttttcaaagagaatcttgaagaaaagcgaagcttcgaatgcaatttcgccgaaggggagtatttcggctaccgtgaaaactcaaggtggattggagaaacgggcgtgaaagacaacatagaaatggtacgaatttacttcactatatcgtggattgaatttgactaacatgtccagctcaatattcccaaagctattccagaatgggatgatgttcccaaacacaggatcgtccgtcaaaactacgacgagattgccagcttccatcgagatcttttcgacaaggttgtccgcaagctgtttgtcttgatggcgattatcctggaattaccggaagaccacctagttcaggctcacgcctatgataagcgttccgatgaccacctgcgatacatgatctacaacacgcgcactcaagaggaatgggacaaggcacagggatataccaagggcggtcacacggactttggcagcttgacgctgctcttctcgcagaatgttgcgggtttgcagatccggacgtcggatggggaatggaaatacgtgaagcctgttgaggggggcattacgtgcaatattgctgacacgttatcgttccttaccaatggcaagtgctcatatcagttggtgcgacaaatatctcgctaacatagggtgacaggtttcctcaaatcgacaattcatcgtgtcgttacacctcccagagatcagatcgatatcccccgccttgggttgctctacttctgtagaccgggtgatgacaccgtgatgagaaccgtgccctcgcctttgcttgaacgtcttggtcttctaaccgaagaagacaaaagccaaagcaagcctgctcctaccgggactgagtatgttcgagctcgggtgcgggatgttcatcataaaacggtgattgatcgtcgggaaaacacttcgtttgagttcaaaggactgaaagtgcccaactattataagtgatagattggtggtgatgagaggactgagtttaccaaattctatttccatgcctatttctgatagtgatgaggtggtgatagtatcaggagtcgagaaaaaaccagaagatgtagctggtgactctggtatatattacctcgtcgacaaggcatcatattatcgatatcatctgcgacaggtcatattcacgtggcatagacactttgtacagatgatatgagcaaaggataagatttctgtctagcctcaggcacatgacccaagcacatcagccacaaccccgcagtgagtcatgtatagaactgtaagagcctcagacaactcggtaattaaagtatgtcagagtgtggatatcatgatcttcgcagcctggtcaacgtggggtacctcactgaactgtccaactatgcttaatgaaataatacgatgtctcagtacatagtcatgcattctatattgatttcctggggactaagtaattgtttcagtgatatattcatattcaattcaattatctacctaatcccaagagtgggagctatctaagagtgtaaggctcacagccttgtcccgaaaagggcgcattccaacgcagcatatcaacgacaaaggaaaattgacaaaagaccaaatcgatcgagacaagcttctccacatcaaaatgagtcacagaaacagcagccaataaaggcagtaaaacgaaaaaaatacatgcatgaacatcgtcgactttccgcatccgtgattggccaatgtctccacacctgcacctccttccgggatgactgcagcaatgcgacttggccaagcctgcagataattgcacacaatcaaaacaattgatcgagtcacaatcaagtcggggtccgagactgggaggtcccgcaaatctgggaccccgacatgcactcgagtcaaagatcaaagctggaaaacagaaagtgaatttccgagggctcatccggcaggccctatcaatccagactatcaaagactagggtatggggggttggggttggggttggggtaggggtatgcctgtaatgtgctaattccacatcaccggtcaagaccgtctcgcggtcagatgggtgtgggcaatcaatgcccatcgcgagtgaattggggtttcttcaaagcgattgggttgggggttgtgtataatcgtaatcagaaaacagagtcggaataccttgccaggtacagacaggtatacgttcaacggtgcttgggggagccgtcaacgtaccaccgaggagtctcgtagtggcgctccacacgctcttgtcggtcagcgccgtacaatgacccacggctagaggatgggcggctgggagatccgccgggcgagcggtacatgatggaagtaggggaacgagaaaggcgaggggccctctcgacgagctggtaagtctcgggggacatggaacgaggacgagtctgcttgctgctgaccttgcgagctgtgacggtgtaggtccggtcatagctcgtggactgggtggtttcgactggttcctggacgacaatgggcttctcgcggatacgcaagccttgctcgagggctgtgagaagctcgcgggcagcgaaggcatctgcgggcagcctcacgcggattgacttgccactctcaaagtcaacggtagagaagtgcttgccattttggctgaagatgtagttgcgaagagtgcgggcgcgagtgttgcctgactcgcagagtgcgccaccatccttgtatgtctggacggcgtgagcgcagttgcggcaccggctggcgtgattctcaaagtcctggaccaccagcctctcatctgcatggagctcacgcacaagcgccacaggatctgttatctcgattggggcaggcattgtattggtgcggcgtagtccaagtaggcgtcgtttcagactaggacggggaggagatttctccgtagaagtcaaatgagtcgagcggtcaacggtatacgaggtcgagcggaagggcgacacggtgactgatttataagggtcacgcgaaagcggtaggtgatcaccgtatagagatgatcagatgtgaaattcaaggcaatgaattggaaagtgaagttcgaatgtatgtcaatgtatgccaatgtatgaatgtgtgtatactgaggaagatattctagagtaaaaggcagggggccctggtcattatatactgagtgagtatcatgcagagtctatagatggcgtcctggcgcctggagggtctggtgtctgctggtggggcctgagatctgcgatacctccgtggtacttggcccattcacgctaaacagacgggaaatgcaagtattattcttgtaatacgtctgctctgtattttccgtactggctgaggctgtgctttatgtttgtcatttgcttgattggccctgatcctcccaattcacagttaacttcaccacaacctacactatttccctttcagtccccgacactatttctaaggcttgatttagttgtatagcctgatccccatgacatcaactatcgggagagttttattacgcaagtcattcaccgaaaatcgtgtggctcatgtttctcgttttcctgcgtaatgacaagggtctcgtgccccctgttcccctcccccctgagaacaggcctcgagttcgcgtcatttgctaccctttgaacgtccaaggttgacactccgaaatagaatctcaagattcaaccagagccagtacattcggaaggaggtgtttcatcgcagtgtttccgcccactcattccccacgctcataggctcccgcaaccgcgatgagcgtctaccgagacaaatctggaactccctaaaccacttcaatgggactttgagcattgttctcttgttccatatttggagatactagagtgtttcaaactatctaagaatagtgcgcgaactcggattctttattttggaccccaatattcggggattctcaccagcctcaattacccctcccagctgcgagccgaaagatatacaacagctctcatccagtgctttttccagactatccccaatgtaggatgactgctcagcctcgaccactaacttcacaatctctgatctgtgattcgatacaccagccactgatgtcttctttcacggaaactgcttcctcacaatttatccctgtcgctacgccgctggcgttcaagccaagagtttctattcgatcacaaccttgttttcgatatgtttctatgtctccattcacgtcgcttggcgcgcgcgccaggctaccatttcttcgatgcatcctctttttccctccctgggcatcataagccacgttgttgataccatggggcccgagcctccgattgcgcgaccacctcaaagagattgttattttttcttactctgtttcaccaagcgccaacgagctgtctatccacagatcggccgtctattcatgaaccgtcacgagacgtccctcgtgtcaacatttacccgcaccctcgagattcatgttcccatactgaccgccgaccaaaatcatcgccccgagctaaccctgccgcagtgccaatatcacttgtactattgcaacctcattcaacagcccagccgggctagctcaatcggtagagcgtaagactcttaatcttaaggctgcgggttcgacccccgcgttcggctattcctaaaaccaaacctgagatttctggtttgtccgtggtcctcatcaacggagatggaggttgacgaaagaaaggagagttgagagaaagaaagggaaggaaagagggaatgatagtgtggggagggtaattatatatgtcggatgattttctgacaagagattattgaagaggtttgcgttgccatcaaatgtaccaacaccaggtacagtataatcaaattaaaatagcattcaagtagttatacaaccctatatgacagtgtcatatacagttatgcttctcaacgggctgcaggatgcgctaagaccgccacctgcatgtctatattctaccaaagaccttgtttccgtccatggagcactgtttcgctgctctcttcaacagcccggccgggctagctcaatcggtagagcgtaagactcttaatcttaaggctgcgggttcgacccccgcgttcggctattcctacaaaccaaacctgagatttctttttttttcgctgatcaaaattttctctttgagcctcctccgcccatacatgaagctgattggccgttgtagccatttggtccactagtgggtccggtcggtggcttgagaactgcctatgtacaacgtatgttttgtgtcttgcctgcatagtggatatcctgcgcatgaacaagcaactgtacttgtcaggtcacaagtattcatgcaggacaaaaattcttcaccgagtctgactagcaaggtcaaatcccggccgccatttgtggcttaactaggcccgagcgcaaggcagagaacgccttgtgctgataaagggtttttctccggctagacatgcatgatgtatcattggaaagtctatgtaggcattgacttcacctttgaaataaccacgccatttttcctatgattcgtcattaagaatcctacgttgccaagaaaaagctacaagaaaataacattgctgatatacatcgctacatgtagtggctgcatcatcgggccggtttttaatcgtgcccctaaacccaattccacatgattcctaaacagaactgatttagacccactatgttaactgcctacgacttcggagatatggcgagtatacaagctccaagtataccaccctagcatggcagcctacaacggattacaattccgagttgagagaaacataccgaaggcatttgccacccaggctaattgcaacagtgggataggctcgctacccctcaattgggtcgtctgccttgagtatcgctttgtcctcatctgaaatggttgacatgttgaatcttctagggaattctttttcttcgcttcccctctttcgtctgccgcggtagccttgattgaaagccatgagttgcctttttgccaatcacatcgctgctagagagggcacactatccaccgtgcaaactacagccttggatgtctgaccatgaacgccagtctgcatgttaatgtgtattgagtacagcgggagtgctatacgtgcttccctttgatacgttaccgaatgacaccaagattgatcattttaccaacggcctaccaacgtcgagaagtcctaatgatagaccccctacatcttttcataacagccgtaagtgttaatatggatgttcggtttatttacgagtacagagaatacacttactttacaggtgcgtacggtgtaccagcagctcatagaacatatctgcactaagaagtagtccgaaaatatctcagtgcttaggaagagaagcgatttttagaaaagctgaggaaaggtctcactgcctccacatgaaaatggcccgcttcatcggggatagggaaataataaggtagtcactgatctagaatcgtcggaaatgccacgatctttttttgaatatctactttccggcgtggtggattactccatttggtttggatccccagggaactgaaaccaacctagtaatggttgaagccaagaagactaggtctctagacgaaggcatgctttcatttctaggatacatgggtaatgatcttgagttacaccttactaacatgaataaacgcatctgctgacatgaataggaatgatccatcacgcgaggaaaacggcgaaaatgcaggacactcccgtctatggcatcgtcaccgatagtttccgctgggatttcatccaaatccgcgctgatagcgaagtacaaaacccatgggacatactagaatgtcactaataaattatctagttcgtaactcgacgatacagatggaaaaagagcaaggctgagtttgtgtccgtcctctacgagattttcgagaccgccacatgttcctccgcccagcctcagtagcagcgcaagtgaaggagtaaagattcagacaccgaattcataactgagttgagaaaccactataggcacaaatggagtagaaatgttcgtgctttgcccgagaagccatcctgaaatatataatgactcgcccacaactgtgagcccgttttagatggctactatcccatgaatcgcaggactagcacccgtgtttacatgtagagtattgagggctatgccaatctcaagcttgaagtgatgatatccatgtacgagggcagtcacgtgagtgctgactcagggttatctcgaactcgtgggcttccctcaggagcggcgtctagccgctgggcaaccggggcggggcagtctttaatctcaaggttgatcaactccacttgttcataccctctccatttgttgacgtggccgaattcttcgattacatgtactccttccttagttttacctttaccacccacataaagtagctgtctatactgaattcttgatatgcatcggaagacgcaataatctgcccttcaacatgaacacaacgagtgacggcgaagctatggcggccaagaagcaaagaaccaccaagaagcaacgaaggaccaagaagggacggtacttcattcgttgtgcggtcgtaccgttatccgactcggtgacctcgttgtgaagtctggccacctccgcccccaggaaggggaaacacttcgtttcatcatagcaagtacgacgatccatataccttacattcatgatattcgctgggaagatggcaaagtcgatgctcttataatggactatatgcctggcaagccgcttgataaagcgtgggatactttaagctctagtcagaagctctccattgccaataagctatattcctatatgaagcaacttcgtgagctgaaaggccactatattagggctattaattggggcaaagctattattggacgcattgcatcaattgaagggggtccatttgataccgaggcgcagttcaacgaatttattctaggagatttcgtcaagatagcaccagatatgctacgacattataccaaatttgcgcttatggatgaccatgagattgtattcacacattctgatttcgccccgcggaatattcttatggaagctggtcgagttacagctattctggactgggaatatgctggatggtatccagcacattgggaatattgtcaggctcttcgccaactgagaccaatgtttgactggccagaatatcttgcccgtattcttccgcccaaatttgagcgagaatatataggcatgactttcttagctcgtatctcacgtcactagttagctagatactgttgatattatgcagctacatacatagtcgcctactctaattcgggagccatgtatgatgcatccattgacccttcttgcctaaatactgcctcagcccgagcaacaatgtaaagaaaaaaagatcaaaaagaaatctcaggtttggttttaggaatagccgaacgcgggggtcgaacccgcagccttaagattaagagtcttacgctctaccgattgagctagcccggccgggctgttgaagagagcagcgaaacagtgctccatggacggaaacaaggtctttggtagaatatagacatgcaggtggcggtcttagcgcatcctgcagcccgttgagaagcataactgtatatgacactgtcatatagggttgtataactacttgaatgctattttaatttgattatactgtacctggtgttggtacatttgatggcaacgcaaacctcttcaataatctcttgtcatgagggcgatcagggtaggtggataattataccaagggcaataataccatttacggaagtagccgtcaagatataatcgtcggcttgttgatatcgagactgctagtgaggacttttccttgcggactgtggatgtcttatgttatgtaaatgttcggaaccgatcctctgttctgttgctagtgggactattcagttatccagagatattgcgacgtggcactagtgttgactgaaagaagaggagaccagatatattgagtttgcatgaatccaagtagcataaaatattcaagtattcaaattcatgagtttacctcccgacgctaatacgcaaaggggatgtgcgggtgaggtcatcacttgccctccgcaaaagtggcaccatctctcgagtctcaagtgcgatcacatcaaaagaaccatacatacatctcaaacacaaaatgacatctgcccaaccctcagagatgaaagcctggctctactccagcacagccaacggtcttgaaaagaacctctatttcgacgcctcagcacgcgcaccaccgaccgtccacggcaacaatgtcctagtcaaagtcctctcggcctccctgaacccagccgactacaaagtccccgagatgggattagtaggactggtagcacaaaaattcgtgatcggcacaccagcctcaccgggaatggacttctgcgggcgcgtggtggtcaccggcgatggcgcgaccgagttttcaccgggccagctcgtgttcggctgcctcagtgtgcctgcccaattcggctcactgggcgagtacctagtggcatctgcaagtctgcttgcgcccgtgccagagggcgtggaggttgatcatgcggcgtccatcggtattgcgggacagacagcgtaccagtccctggctgggtatgtcagtgccggcgataaggtgtttatcaacggaggctctggaggatgtggaatcttcgcgattcaaattgctaaggagatggggtgtcatgttaccactacttgctcgacgaagaatgtggagttttgtcgtgggctgggcgctgatgaggttattgattactcagttgaggaggatttggttgctacactgcgcagtcgtggtgttgtctttgatcatattgttgatcatatcggataccctgcgccgatgtatcgcgagtcgcatcacttcttggcggctgggaagacatttgtacaggttggcgcgtcgggcgtggggacttttgctgataggttgatttggcctagtttcttgggtggtggaaagaggaaatatgttatcttcttcttcaaaaatacccgtgaagatcttgtgaagattggggaatgggtgcagaaggggactgtcaaaatccagctggattctgcctacgagtttgaggatgctgttaaggcattcgagaagcttcgctcctcccgtgctaggggaaagattattgtgcatgtggccaaggcatgagttgagattgaatacaaatattgcgagtcgaagtggtctttttagggtttggcgagacaacctctccgcgccaaatcgggaaagtgtcacatctgagaaaggcatagtagcgagctccgacgtaaacttgacgatgtatctggctatgtgagtgaaatgaaatgggatttccctcttcctcatcgctaatattcaaaatcatcagttcaacggctttcttttgttcagtatgcaatatctattatttccttttctgggtatcttcggttgcattcctattgaaatccgcctgatgatatgggaccacctcttctcgtccctccgcaaacaaccactcaaggatgacctgcataaagacaaacctcgatccattctttgcaccagccgatatctgtacaatgagatctcatcccatatattcagaaactccgagcagcacatctttatcagcccaatatataacgaagaaaattggatggtcatgcaattgaaatccagagttgtggacgttgagtgggcattcagtagtaaagcggacgccaaaaggcatttccagaacttcccccatccaaaaacgaaaatgatagtacatatcagttgcccaaatccatcagacccgggtcaaatggtgttgctttggcagaaactcaacttgctagtcgatcttctgatcccggtggctcggccgactatagagctggcaactaatggaccatggtgcgcagaagacccaccgactcactggggaatatatagagatcaattttatgagatgggggccctacaggagtcaatccagtccggacccaaattccgtcctgaccacgaccttgccatgttacccttccttcgtctagggctatgggtccaagatccagaaacaaatgtgcccgcaatgtcagaccgtcatttcaaagacctattccagtccctcgtgtctctattcgatcaaaaagggatcgagctccgattaaagaggcttctcgctatcacccaggacacagccgtcagccaaattggaaatgcactcaccgataccgacatgttcttagagacctgcctggatgaactaccaggcagaacagccagcttccttcgtcttgaacgatacaaaaactggttcgaagacgggacaagctgggaatcgccgtatgagacacgaatgcgagaccaattatccacctgtccctgggttatcatgaacacggatccttggctccatcgatcgaatcagagatacatcgttcttattctactacaccatttcatgtatgcgatgagagcaaatttgtgtgatggactgaggatttttgacgatgcaagaatatacacgacatgggactcggaattgtggtcgtattatttcccagatggcgtttcggagctcagccatatccaaacctggcttacgaggttctggccccagaagtcccagtttcggaaattccatgcctatacggattggataggtcaacgacgggcggaagaaaatggagctgatgaatccagttgtgaatttatacaccgtttgagcttgtggggccattgaaggctgtcaaggttggatttatcggtgagtatcgaaggtaacagcatgcgtgtgaatctttggctcagttcgaactggacagtcattgttggttggaatattggaatctggtttatggtgcgagggaaactagctaaggaaactaacagatcatgttgtcactacaagttgtttattctatagttgagacagaatatcaaaggctcagcccattcttacggcaatagttgacaacttatacattgtatcagaggtgtatttgacagatgtgctcgactgtattataaaccccaagtcctcatctacagagcagaatgcttcgagggatcttctttcaaaggcgccgaataatcatcgtcgtccatatcaatcatttcaatacggtgggtcatcatgttctcctgagtctgcgcctcgaccttcttctgcaaccgtgcatcttccccaaagccctcctggctgttcagggcctcaagagcagcagatgattcccggtctttaacaccagccttgcgctcattctctaaccgctccttctcctgtcgcttatcctcgtgggcaagagcagcttcttcgcgttcaatctcactgggatcaaggtcctgaagcccgataagggtaagaattctgccaagcagaaactgataccgcaggtggccattgatcagttcgcttacgttgaggttctcaacacctggaacaccttcaactggctgcaatcccgctacaccgagttgaaagctgcttgttcggtagaggaaagcgagtacagagtcattttcagagaacacgttcacaacacgtccgcttacgacactgcgaatcttttgccagtcctccgcgtttgaaggggtaggtgaccccatcaaaatgaccgattcgatcaggccatacgcgtctctcctttctaggcttttgaggcaggagaaaatcagacgagaccctagagaataccccatcaaggtcacgggtcgttctccctgggctctgttaatcagtgcatcagcgagaacctcgcccgctttatcggcgcgagctttagccacgctgaacgggttgtcgacgatgccagcaactttcatgaggcctaggggaagcattaccgcgctcatgatcgtgtggaagaaagtacgagccaaaacctcacgtccggcaaccgaccacgcagcgctagtcacaagagctgatatcgcgttacccaggttcatcaaaggctccatctcccagcgaagaccgaacacttcagagtcggcaccaatcacccgccatgggatcacgaagttcgactcttccttgacccaaccggtaacaccaatggtaacccgtaaacgatgatcttgtttagcagactccttctcttttacattccggcggggttctcctcttatcggtatgaaggcaaagtcgtccacttcacgtgcgtacttttccatcatgcgaccagtcatacgtccaccgtaagcgccaaaaaggccaccaacaacgacgctacttccggccaaagtacctagaagcccagcagcagcggtagcgccaaggcccaatccgcccataacagttcccaggcccgccgctaccaatggagctgcgagtccgccagtgaggccaatcaaagcggctccagccacagatgcaaggcccactttccattttctcatgtcatcatttttctttggttgctccttggtatcttgatctgccgagagcgccaaagctgtctgcagcaatccgcgagcgacagtgacttcgtcttgattgagtatgttgatatctatgttcagactggatgtgacgttcaacatcaagactcttgagtaagcactgtagtgctctaggctgagcattaaaaggagaagcgagtgaagaataagcagtcttgttgcttttgggagttttgccaaaggtgtttccacggggtggtatatttcttgtaacttggccagtctatctttatcctcgtccagtggaagatcatcagacttggcggcgttccgcaggtcttcgcctgcctttttttcctgatcatcatcatctttattgacgaccgcgccaacacgcaaaaggacagaatccctccaatcctcaaaagtggagagcgcacggatctttggccgggggattggctgtttgctagtagatccctgccgcggacttccattgtttcctgacgcgtccttgtcttgtgggcttgagggcaagtgtggcgtctcttcatcgcggtccgcccccggagatgggcgtggactggagtgattgggggaattatcctttgtatttgtatgctcataaagctctagaattcgaacccgcattgactcagctacctcagagacgaggacagttaagtcagcacgctgcgaccgatccaagatcgatgatagatcttgaccacgatcgctttccgaagcattggattgcttagattcaaagaatcctccatgtttttctttgagacttttgaacattggcgctgaatagaggtgaaaaaggagttgatgacttttcgaggagtaaacaggcagaaaccgatgttgttggagagggggcgatgtcgtcatggccccttactccgccaatggcctgaggcagaaacacctgacccatgttaagttgatatcactctgctttgcttcatgcggaatatttatgccttctgtatattcaatgccgtagaaagtcgagggagtaactcaattgccgatttcaacaacaaaaaatttcccctttgtctttgtcgcggacccgagcgcattcccatcccaagcggttccatccggatgattgtttttttcacctgggactcgctggatttttccccgtcgtccggacaccttttccttagctagggcgtccctgagcctttcgattccaatggtttcctcttccatagcagcaggactttcatcgcgaattctagccagcggcgcgacgccggtagtgtcaacaagttggatctccttcacaaaatgaatttgagactcgagagtatcaagcatagactgttcttcttcttggctggcaggctggggaagagctgagatgcgcagcagatgatggagttgtttcggcgtgattgacggtggcggtttcgaggcgggattcgggaggagtgatctgacagaccagttcggcgcaccaagtaagaactcgatgtctgcactgtggcactttttggaagagtagaagcgacagaaggtcgtgttgagtcggggaggaccggggcgtaacgacttggatagccgagcagcagtgcgaagagaggtcattgcagagtctccgaggatgggaaatcctgctgtgggaagaatacagagaaagcagacgagcgaaatagaagcacagtctaatctgaacagcacagtgtaaaagtagtcataggttagcaccagggagcttaggcggatatcgagaaagaagtgacaccgcctccacgggcccgccgatcgatgctctcatcgataacaacctcatttgaccacgacactccaacttcacatcgaatatctgcggactactgcctattgcagggaaaacagacacatacactcaagatgactcaagatccccgtgtcctgctccaaaaagtaagcattcctccccaccttgcatgggcaatgacgatagtccgcatagctgactagacctcgcttgttgcgatgaaataggccgataaagcgctatccggtgcctctagcggcttcggttggtttggaggaagaggagagaaatatgagagcgctgcagatctgtatacccaggctgcaaatgcgttccgagtacagaaaatgagtgagataccccgcggcctaactagttcgttgacttgccaaggggaagctagatgactgacctgcgttctcaaacagacaaggaggccggtcttgcttttgagaaagctgcctccatccaaactcagagcctcaacgaacccgacgacgctgcgaataacctccaggaagcgttcaaggtctaccgcaagacagaccccgaggatgctgcccgtgtactttccagtgccatccagcactacgtactacgaggaaacctgcgccgtgcagcaacgcaacagcaatacctggctgaactgtatgaggtggaacttggagatatgaagaaggcgctagaggcgtacgagaaggctgccgattggttcgagggtgacaatgctgaagcgtatgtatcccatgattttttttgatatctgtggattcggggaagtaactcggctaacatatactacaatgcagcctcgcaaacaagcactacctcaaagtggcggacctgtctgccctggaaagtgactattacaaagccatcaccaactacgaacgcatcgcccgaagctctattaacaaccacctgatgaagtggtctgtgaaggattatcttttgaaggcaggcatctgccaccttgccacaaaagtatgttgtttccatcttattcttatagggaaacagagtattaattatttataggatcttgttgagactaaccgtgctttggaatcataccgagaactcgatccttcctttagttcgacaagagagcaccagctactcgtagacttgacccaggctgtcgagaatggtgaccaggaaggcttcgccgacaagctcttccagtatgaccagctcagcaaactggacaagtggaagacaactctccttctgaggatcaagaataacattgaggaagctgaagaggacttctcgtaaatgacgattgatttcttcggtgattccccgcgcgtgatgtctagagaatattgactcttcggtttttggcttcttccttcgtttgtttatcttggaaatttctggtctgaaagtgaaaacagatcgatgctaccctcattggttatagtgtttttttttatctggccttattgtcacctagaaatatcaaatctcgaattcttgattatggacatttggatactactgttgagcgcggaatgcaagagtagaagattcgtaattcatcattctaagatgcctcagttctatatgtacttttttggggtgtctcatgcttccttcagaatcagcagagctgccctcatcatgtaatcagttcagtcaaatggtatcatatcatccacctccccagtgctattgaaatcaacagcttacgcagtaatggcatccaaagccttggatttgcgagggaacacgcgcttgtataaactgacacccacggagtcttgtgggttgatcttggcatcgaaggtagccttgaagtatccgtgtgtacccaggctctccttgaagtatccactgcggccacggcgggtccacaactggagtgccttgaaccactggatatcctcggcgttgaagaacatgtagcggatggtaacgaccttcttgtggatcttgtaggggtgaccagtgaggatggcacgcttcgcaaccacgcgcttctgatcgggtgcgacaacagtacccgtaccgatcagttcgagttggtccagggcaatcggctcctccttggaatcagcggtctccatctcgtcgtcagcgtcctcctgctcggatttcttctgtttgaagacgagaataggaactgaaccccaagtcatgggtccaatccaggatgcgatggcactgcggccagggtgcaagtatcggtcgtacttgtgaacgttgttcggcgtgttatcagccgaggagaagatggggttgacgaccatgcggcgggctccgcactggatgacgagctgctccttagccttgaggggcttctccacgctggagttcagggtcatgctaacgttgaccacagtctgcttgtgctcatggcggagcagagagaagagagagataggcttggggctattgcgcagaatggaaggaactgcgcgaaggtgaatatccacgcggacaccagggttaacgccgccggccaaagcctctcgaatgatgcggttcttggagcccttgacatcagcaaactgcaacagtcggcgccaatcctcgggctcgtagggacgatcctcggatgtttcccagtggctgagcttgaggttcttcaatcctcggaatcgggccaggcgttctctggcaagcgcgttggggtgcaattcaatttcatcggggaactccaagtcctcttcggcctcggtcttgcggctggcacgatagtcggccaattcctgggcttcgtcctctggggaggggtcaaggaacatctccgattgcgggtattcggtaccaccgccctcggtcatggcatcctggtggtctgggaacacgccatcttcgggtgctccagcagtatccatctccatgggctcatcctcatcctccatgtcggatccggagtctgagacgtcatcgagataccaagcagactgataatttgaggtacccttgggcaacttcttaggtaccgggggaatgtgcgagtcgtcatccgagaagtaatgatagtcatccagcagaacacccttcttttctgtctcagccatggaaaccatgtcgtcatccaccatttcaatttcttcgggagcgataatagccatatcgtcctgatcctcagtcggagtatccagaatttgtgtggtctcatccgcatcaacagccattgcgtcatcccgcttaggcttagtagttgtaagcggcgcagctgtgatggaatcaatctggaaatcgccccatccagggacatgaacgatccggtctgccttcaagccccttccacgaacaactccggtgatgacgacgtcgtctaccacttcctggttggactctggccactgaacattctcgacaaacatccagctgcgatcgtcccgccagcggatacccttgggagtagcagtgcagatagatcggatggcattagaagattcctgtctcgagtcgagagacataaccttctcaatagagggaaagaagtggttaatgaaagacttcaatgtagtagccacctgtgggcgcttcttagggggttcaatcttgtcgagaccttgcacgacagccaacacattcgagataccctggccttgaatcgagcgcaacagcatctcgccctcctcatcaacctcaacttcagaggacatgaccaagatgacaaagtcggccatacggcacacatccagagcgctcatcaagtcatacttggcaggaacgtactgcacgctttgacggaatcgatcgatgcgcacacgggtgggcccatcgggcgagacgtcagtcaagacatcgacgctctcattgatagaagcaatagcagcggcggcgtcaacatcggcggataacggcacaattgcgacatgacgtggagcaccattctggccggcgaagacgctggtagcttgggatctttcctggtgcttcaacacctgtctttggcgggcggtgttacggcgatcgagtttcgtcttaagttgttggtggggtgtcctacgaccgccccgctcatcaccttcgattttgcctgtaatagtataagcgttaaatttgcattatttaccatacttggacattttaaaatcatacctttggcctgatccttcaaggcgcttttggaggcatgcttagttttgtagggcttgtgggaaaccttggtggtggagcggtggtggtgcaccgtctgggcaggcgccatattggcgttggagcctttgaatcggaaagggagggattccagattgaagcgagtcagaggtaactcggcaaatatccagtcagagctatttataactggcaaatacacagaaataaaatcgaaagtgcctctagaaaaaaaaaagaggtaacgataagaaatcaaaattcgccagtggaggataagcgagcggtgagcgcaaatcttggcgaaattctgggcaaaacactttttttcttgaagctacgcttttcgtccgccctctgatcttcctcggttctttcgcaaacgaactcgagaaattgccataaaatggccgactcagcctcaaacatggctgtcgccaagggcgatcacgagtccaaaatgagactcgcagcagccgagcaaacctacggacgaggcaaaggcgttaatgcgaagagtgcgcgggacaagaagttgcgcgcaaatctcaagaggcaggaattcaagcacaaggaggctattctccaagccaaggatgcagagattttgctcgagcacacggaaggattcctcgaacccgaaggtgaactcgagcggacatacaaagtccgccaggatgagattcgggacagcgtcggaatcgagacagcaaagaagggatttgaattgaagcttcccgatatgggcccctaccgcatggactactctcggaacggacgtgacctgctgctggcagggcggaagggacatgttgcgacaatggattggcgcgagggcaaattgggctgcgagttacagttgaacgagactgtgcgggatgcccgctggctgcataacaaccagttcttcgctgtggcgcagaagaagcacacttatatctacgaccaccagggaactgagattcactgtctgagcaagcacctagaacctctcttcctggaattcctgccatatcatttccttcttgcaagcgctgtgagtatcctcgcctctttgattccatagattccccgctaatcaaacctttgtatagcaaatgagcggccacctcaaatacacagatacctcaaccggccagaccgtcgctgagctacccacgcggttgggtaaacccaccgctctcgcacagaacccatggaatgccatcctccatgtcggacaccaaaatggagccgtgaccctttggtcacctaactctcaaacccctcttgtaaaggcactcgtgcatcagggacctgtccggtcactggcaatggatcgcacaggccattacatggtatctacaggtcaggaccaaaaaatgaatgtgtgggatatccgcatgtaccgcgaggtgcattcatactcatgctaccaacctggtgcatctgtggctatcagtgaccgcggtctgaccgcagtgggctggggcacccaaatgagcgtatggcgtggtcttttcgacgccgcgcaagccgaccagggcaaagtccagagcccatacatggcgtggggcggagacgggcagcgcatcgagaacgtgcgctggtgcccatacgaagatatccttggcgtaggacacgaccaagggttcgccagcgtcctcgtccccggcgccggtgagccaaacttcgactcgctggaagccaacccttacgagaacgtgcgacagcgccaggagcaggaggtccacgcgctgctcaccaagctgcagccggatatgatctcgctcgatcccaatatcattggaaagctcgataccatcaacgacaagaagtatcaggagcagcgcaacccggaccacaagcccgaagatcacatggagaagatcaagaaccggggtcgtggccgcaacagtgctctacgcaagtacctccgcaagaagggtggcaagaacgtcatcgacgagaagcgcgtcaaggccgagacgttgcgcaaggagtatgctgctcgcacaaaggacaagctcaagcaagagcgtcaggatcttgggccggctctgtcccggttcgccaaataagatcactgagtttgtttcttgcttgtgtgacatcttgtggagcagtagaggaacaacccccctctgcccaaaaccacccagatacccagcccacacgcggcttctgtgacatattggagatttggcgacagctgcattccaggcgttctcggggaatatgtttgtattcggacggaaaaagcagttaaatgtgtgtaccatcttttttcaacacattgaatatattgaacttcataactattttatacttcttaaacttccaattccacttcgtattccccttttgaagttttcaaggctatatatccaaaatcacaagttaccggacctaaacctaccagtctaaatagaacatctactcatcaagactcccagaccccctaacagccccatccttccacctctgcaaactaacctcataagctccactgcccttccaagcactaataatcagattaacaatatgatccatccccttcccatgcttaacgaccgcaaacaccgtcggacccccctccctcatcttcgccgcatctctctccatgacagcaagatctgctccaacagcttcagcaagatcaatcttgttcacaacaagtagatcagaccccgtgattcccggtccacccttacgaggcaccttatcaccacccgcaacgtcaatcacgtagatgatgaaatccgccaactcgcgcgagtagttcgcagccaggttgtcacccccagactcgatcagcaacaggtccgttgtgaactgcttctgtagtttctgcagcgcgagcaggttcgcgctgatgtcttcgcgcaccgcggcgtgcgggcaaccgcctgtttcaatggcgcggatgcgtgacggcgccagggctttgtggcgggttaagaattcggcgtcttctctgtttttcgagagaatgattaataatgttggtgaggtatggtaggtacgagtcttgttgtttcgggtgtgggtgtggggttggtaggtggggttagggtattctctcgtaccttgtgaagatatcgttcgtcactgcggcgatattatactcgtctcgaagggcgcgagatagcgctagcatcagggctgtcttgccggatcctacgggtctattcagatccaagactcatgtgttagtcactggctctgcatataggtgtggtgatttgaatggatatgcattggtataaagcaggtgaaatagaggttgattgcaggatagagaatggcaacatacccaccaataccaatagtgaaggcacgatccttccagtctcggccttcgatcaggggcatctcgcggttgacgtaggagcctgggccatcgaggatatcgtgtgcatggccgtggccgttgaaggggtcatcgtgggaatggtcaatgccggcgtcgtgggagtgagagtgtgccattgttaagcttccaaggttgatagatgttaagaccaagtcagctcaggattgtttagagaaaagccaagatgaggggcagttctatcccttggaagggtgtggggaactgatatgataaaatgccgagccttcgatatcatcgattcgccgctcggtttgttcaaaagagggatactcttctgtaaattgctatttggggatttatgctggttggaatatttaagaaatatgcaaagatgtccccaagggagacatttcaacaaataatggaggactgcatatatagagagcccatacttcaataccttcatgtatacaaactacgatgcatcaatgaagattgaaaagcatgtatttatggattcgtcaagcagcggcagagagagtataagccccgagggggaagagatgtcaagccaaatggaccatagaacacccctatgcacgcagacgtagttcccaatgaaacgtaagagccggacgcctatcattcgccaaacacggatatcaatagttctgcctgttcacaagaagaagaaaatgaacagactgccaaggaaaaagcgaataatgggcaaaagtcgttaaatcccagacattgatggcaaaaggatgaaaatgaaacccgaacagtaaagagatagaaaacatgcaaggccaggaaataaacccgagccaacaaggaaacgctgaaaggaagatagagtacattaggtcggagttgagcaggatcgatgaggcctgacgctacttccaagcgaaggaagatgggaggggcctcaagcactgattaaatcccgtcgattgtgaattgagtcgtcatgtgccaaaaagcaagatagatctttcaggtagatgaaagacctagatgaggagtaaacaaacaagagcgggcgcgacatgcctcgcccaggtatccagtcgtacgccggtcccgtaccgcctgagacggcgaggaaaatgaacgcaagggaaagcaaaccaaactcccaacatgattaggcggcggcacccttttgtcgcttcggcacccgagggctagcctttactttcgctgagccctgctgcggagcaccgttagcttcgactccaccaccgtcctcggattccattttgacggtgctcgcccggcggcgtttgttgccacctacatttggactgttgttcacgccggctggggacggatgcattggtggttgcattccggggggaccggcaaggttgctttgggctgggctcggatgtgctgaaccagtcagatgaggcgagccttgctgcccggggagaccaagatgagccatggcaggcgaggcgaactgtgatggagcgcccatgctatgtccccgaacattttgcatgggttgcatgcctgggttcataccgggattcataccgggattcatgcctgggtgcatcgcgtgattcatgcccggactcatgcctgggtgcatcgcgtgatttatgcccggactcatgcctgggtgcatcgccggattcatgcctgggttcatgcctggattcatgcctgggttcatagctgggttcatacccggactcatgcccgggttcatgcccggattgatgcctggattcatgcctggattcatacccggattcataccctggttcatacccggattcatgttctggttcatgccctggttcatgcccggattcatgcccggattcatgcctggattcattcctggattcatgcctgggttcatgccctggttcatgggcatgggagtcgatacaaagccaggattgggattttgtgattggagggtgctgacaagattccgtaaagcgtcaggaggtgataactgcggatttgcctgagaaaactggaacaacatttgcatcgcagaaatggtttcagctacttccatgaatcccatgactggagttggcacgccgttggcagtcacttttgaatctggcaccaatgacggcgtttgcttaggctgggcacgttttgagttctttgtgaccttcggactttgcttttgggaatccgcctccatggccaacaacaacgaccgtggaatgaactcgttgtggctgacgacattaacatcgagcatctcaagcttgttgtgcatatcgaagtgcgcgcgcagcgtgccgttggtgaaaagctaaagcgatagatattagcaagctgaaaagaaaatgaccatgcgactagagatgtacctggcactcattcttgaaccaataaatgaatgaacattttggcgcttcaacgtaatgccctccattgtgggattcccgctcgcgagcaccttccaccaccatctgaatttgactaattccgctagtgaattgggtcaaataataacgtgccagtgcgggtgtcgcaatttcgaattgtttagatccaatcgtgttgttccaaacaccctgcctcaagacacctacaggggagtagaaccgctcgacaaacgattgccaatatagaagatcctgtgcttcattgcgggattggaagtttcccaaatgttcggcataggcatgaatggtcaatattgcgtaattcttcctttgctgctgctgttgttgttgctgcatcataagagcattttggtgctgctgtgccttcatttgagcctcctgggccatcatctgctgattctgaggacccggctgatggccctgggaactctgagaaggctgcggctgcggctgcgggccagcctggccctgttgacccggctgttgagattgtggcaattgctgcggtgggggattaggagttccctggccttggggcaatccctgcgattgtggtggttgagtggatggcggctgagaagtttgagagggttgcggtgtgccgcctcctggcccgccatgctgcgactgtggggtggcactctgttcgtgcatattcggaggttgtgctgatgtacgctgcggggtatgctggcctgacggtccattattcccctgttgttgagcatattgagcctgctgagcctgctgcgcctgctgttgagcctgctgctgcgcctgctgctgagcctgctggatagcgaaaaattgctgctgctgttggagacttggcggctggccatgtggcatttgctgctgaaggtgcatcatattaacgggtcgcattccagggttcgcttgcattgcagccatttgcgcagcattaagtccttgagtaccattaggcattgatacgggaagaccctgttggtgttgatgttgttgttgttgctgctgttgctgttgctgctgttgttgttgctgctgctggtgctgctgttgctggtgttgctgctgctgctggtgctgttgctgctgctgttgttgctgctggtgctggagcatcattcgttgccgcattaattgttgctgttgctgttgctggtgctgatgtaatagatggggattattcgcaactatgcattgatcaggacgtaagtatgcgatcgagaaagacggctggaagagacgcgggtgtagcggggggaagaaatcaccgcagagggcagggaccgcgtgttccgtaacattacatctcgcaccccatgcgttaagcaaatagaagattgaatactaacaattttgttggaattgggggttctgaagcatatgcgcctgcgcgggattcaggtgggagagggcatgagcatttgggccggggccaccaggaccaactgccccagcgcccgggggcatgccgcccatcatcgggcccgcttggctgacttgaggtcctcccggcgcagagacgccaggatgcatttgctgtaccattccagcgcccgggtgtccatttggatgttgcgcggccattgggtgaccggggggaaacccatgttgcggcatgccttggtgggcaggaaacggctgcgtcatcatcattgctgagcgacgaagtcaccacaaatgggggacttcaaaatgatcgctcgcgatggcgaaaatgtggtgggcgaaacgtggcgtggagcgcgactggagtgggaagacaacaaggccgcttttagcgttcggggatggaccaagacgtagcgagcgacttgaaccggtattcagcagacgcgaggtgctgaagtatcgatcggggccaagtcactcacccgcgcaatgaatctgttttccttctgaaacaagtgagcggtcagtggggagtgataagagaagatgtcggggatgaaggttaaaagtgacgggggctaggggaggcgtggaggggctgggctctccgaacagtcagaatatctcaaagaggcacaactcacaagtgtttttgctaagggatctggatattagggggctaaaggtgttgcgaacgcccaggttgggaattaaggatgatcgcccggtgggagagagagaactggagacggaggatccgggtccgtatggtggaggatctaaccgagacgacagcgcgattaatccagagagaaacagtgatagagggaaaataaaggactataatgagatcaggaaattgtatagatcttaaagtataagctccatctttcaatcttcattttttccctttttgaggcttttttcttctccttcccctgctctgagtccaatcacacgctatcccgaatgaggatgggtcacgtggtgtcttcgcggctttttcttcacaactttttttttctcttctcttcttcttcatcttctcctttgtctttccttcttctttccaatgccatctttgaggcataccaccactactgtgaattcctattggctttgtggttctctacctcaggtttctggagctctcttaatgttgattgcgcctgactcatgaggatagcatgatccaatgccaacagtatcttacgatccctcaatctcaccactaacctgatagatcaggtgttagcaccttgtgcttaacgtgagtttacatcctttctcgttcttcctgcatttgcatttcctatccgttcaaggatgacaaaacactttacttcttaaccctccaattcgacaatgcggagataatccggacctcccttcccggttggtctgctacttgccagtatatcttgtctgagaacttttattttgcaatgcatctttatcatgtcttgtcttgagcaattaactaatattgttctcagtctagatcgaaacatgaaccacgatgcatagaaggatatcgcctgttgtaatggcgaattgatcaagtgacgaaaaatttctcggatgtaaactcacagacctgttctgaatgcgcaaaaccgtgtagagatttccgttgccttccttctgatgatcaattcgctattacacctgtgtgttgtctggatatatagttgtggaatacccgaatgaaactttattttgacttgaagaatgtctgtcttgtagtttataataagttcacacctaatcctgaatgaacatgtacaagtattctaccatactagttatctactcagtactccgtaagccttaacaatcgggtgaagattccttccgttgtagggttctgcgaggcctcggttctcccaaccctagcaggataatctcttttacgggtcaaatattacagtaaatgttgcggacgacaacttgaaagcttagactggcagacctaaagttgcgttaactaactagctaatggcctagatcttacttgggtgtataaggaatgcttcgccgatcaactacgccacgcagatcgcagctcgcagctcgaatatgtcaagttagtagagacattatatctgtgacaatctgagagtacgactttgcacttatagaggaaggagcgacttcctcgaacctaagcgagaaatcaccatttgcatggttcgctgaaagagcccgcagaaaatcagggagcagaactcgtagacagttaccctttcccttttcctctctgtacttagtattgtgatgaagaagcgctcattcttttgaatcgaactggcacataataatatctgtcacttctcttctcgcttcatgaaatcccctgttcgtaggctatgaccttgtacttaaagggcatatagtgactgctcgaccaaggcgttcattcaaacaaacttatagcgcagtcttctcccccctagagctaccgttcccggaggaccgagttatctgcaccctggtcactcatagaccatggttacatcgagagattggcggttcactgcatcttcgttcaagaacagattttatagctcctcaatcgtgatatctggtcgatcagactgacgatgcatatagaacctgaaatcgataggagaggatacttccctgggatagtattgttagggcaggatagggcgctactatctgcaggaggaatagaaaccattgggaaacgacctatcgtcgtacgcggaagtcttgaataaattggcaacgtatgcctggatgctcattggtatctgcgggctggagcaagacaatatcccgtactggaggcgatgacgagggccagaataaatgttgccagtgaaatcacatcggctcgcttggttctggcgctttctaggttgtagggagacacacccggggcattacaacactggccatgtaatatcgctctgggcttatccctcagcattggtagcgcttgtttttccttccgcgagaatgtcgggggttacggagtcaaggataatgaaacaatatttttcgatattgattggttggctagaggaagaaagagacaaagtaactatgataggggtttgaaccttcaataagtttgttcgaaatcccgaatcctggattagccgcgtatgtgagatcgagccgtactcacaaaggttgcaaaatgatgttgagatatacatgatatgtttgaggctgttcagaggtgaatgagaggttacatagtttgacgtagagtggtctatacatagaatatcgggcatatgtcctcgtacctctatggaaacaagacgtgatcaacagagccaagataattattgatgatgatctgaatactactaccccgtataatttctctaaatagcttcatggagacaaagggacaaaggcctgaaaagcaggaatatttcaaatgggcaaagggagatcttatagactgcatgccagcaagcaatacctcaatgcatcaaaatgtcaaaatgtcaatgtcatttgatctctagctgttgtggtcaagaaaccgaagactgttcataagtaccttttgtatgggaagcccatacaaaaggtacttttacattagtcgcgggggaacgcgcggagcgggtatgaaccttcagtgatcctcgactgaagaatcgtatgcccgcggattgaagatgtgtgcgtgatttgaaatttgagctcatagttctttttgtatatgtatggaacatgtataaattgtaccgacctcataacaccgaacctggctgacgaaaatatattatcacgtgactcctcatttctccttcgtagggtccggtagggaccctgtgccactcgcgatttggtgcatacatctattactctcggcgatatcgcataaagctccggtgacactgtcccggatgtattcgtcaatgcaacaagtccggctgtcggttgcacgcccttgtcgatttgtcgctcgccgccgctattccgcaccgctgtccgcgcgacgattccatctgtcacgaacatggctcgcatcaccgtctcaagaccctcacgatgccgagtctacagcgccggggaatattgtggaagatccttccctcaaacctgagaatatctccgacaatggcacgccggcgatatctccctccaccgaatcagcaaagtcgatcactaaaacctacggatctgctgtacgcagagcgatgcgaaaccgaaagtccccgcagcagactttgccatcaacgacgactgtacctgcatggttttatgagcataatacggtgtctcacagcagtgaagaccgccctacacaatcacaatcacaccaacaggttagaataaccaagtcagggctacaaaaggaactggaggaggtgaaaacagaggttcaagcttccgggggagattcggacccatctgcatccagtgataccccggcagcaacagagaatcggtatgcggtggccgaagaatcatgggaagagctgcaggcctccgtcaaagcaggcttgcggttaccagctgtgaaatatgccaaagagccttcggtaaagaagtcgcatctggcgctgcattacccgggtagtgatggtataccattcctagacgcggtggtgaagaagcttgcccaggagctgggcactgacctggtaactcttaatgcccaggacattgcacaattgttcagcgagcaagatctcgcagatgttggggtaacttcgcccattcgatctctcgggtatgatgtatatcggcaatcggccccaacttcatggtcagaacttgaagatcctgaaggagacggcgaggatgacatgactgaaattgcaggtggtccccgtggaatgcgtggcgatattggcacacctcggtttatcacaattgagagcagcaaagaggccggtgacattccgcttcctaactggcttgggctgaaaaccctcttggggggatcgattaatggccaaacggatccggatcccggggccggggcctcatcaagtggtcagcgtgctgaaactcggtggattcaactacttaatgagctcctcgggtcatcaggtcaaccagcactgtcagtccccactgagataacggcaaatgccgaaacgaaacctagcaagccttcgccaactcgagacctcattatgcatatccaggactaccgtgacattcagaacactcgggaggggtctaaattcatttcactcttgcacaaagtcattcaagatcggagagcggcagggtccaagattctgttgattggaactacttctcaggaaatccaccactcaccctcacaagatggtgctggtctgatgcaaaatgttctcgatgaccagttctcgaagaccttgttcattacccccgccatgagctcgaaagacgccgaaaaggtcttcgcagaagaccgaaagaagcgcaccatggagatcaacattcgccacttgcagacgatgcttcgcttccgattacatgaacaggctctgcctgtaaaagataacatcttaagcgaccgcgcttggccgctagagccttcaaccatcaaagaatcaggaatccaggatcggtactggtcgtacaatcaagtgcattggatctctacacttgcacttggctgcactgaagtcaacgaggcccttgggtttgagcacatccgacgtggaatcgagctcatggataaaagcgaccgagtcaccaatgaatggctgaaggagaagtcacccaagcagaaagattcggaagcggggcagaccagagagcagctgatcaactctttgcgcaaaacgtgcaacacgcacgagaaaaagctgcttaacggtgtagttgacgcaaaaagcattcgaaccacattcaacgatgtgcatgtgccccccgagaccatcgaggccctgaagaccctgacttccctttcactcatccgccccgaggcattcacttatggtgtccttgccaccgacaagatccccggccttctcttatacggacctccaggcaccggtaagacgctcctcgctaaagccgtagcccgcgagagtggagcaacagtcctcgaagtcagcgggtctgaagtgtacgacatgtacgtcggcgagggcgagaagaacgtgaaagcgattttcacgcttgcaaagaagctcagtccctgcgttgtcttcatcgacgaagcggatgccatcttctgctcgcgcaccggagccagcagccgtacctcccaccgcgaactgatcaaccaattcctgcgcgagtgggacggcatgaacgacctctcagcattcatcatggtcgctacaaaccgaccatttgatttggacgatgctgtcctccgccgtcttccccgccgtctactagtcgatctaccaaccgaggaagaccgcgaagctgtcttgaaaatccacctcaaagaggaacagctcgaaccctccgtcgacattgctgaacttgcccgacgcactccgctgtactccggttccgatttgaagaatttatcggtggcggctgcactggcttgcgtgcgcgaggagaacgacgcagcggctaagcacacgggtgacgagccgtatagctatccggagcgccgaattctgactcgcgcacatttcgagcgcggaatggaagaaatcagcgcttcgatcagcgaggatatgtcttcgctgtcggcgattcggaagttcgacgagcagtatggtgaccggaagggtcgccggcagaagagccctgggtggggattcattcctggtgctagtggtgctgcttcggctgattcggcgcgtgtgcggacttgatttttgttttattcgaggttcctcgccggattggggaaatggggattccctttgtacttttagcgatactatagacctgtactattactcaaatgtatatactgccatccatttcttgggcaataaacatttgcattgtttctatccagatgccttcagatctagccttgaggtagtgactacgtggctatacctgcctgctagatttctaactgtaaacccaacacactttgtgcttgttatacgagtgtcgtttgcaaatcgcttggaatatttcttggcctttacatttggagtatgcctaatgcagcaaccctgatagagtaggcagagacattcgtgttgccaggttcctaccgctaaatttcaaagttctttttcttccttcatgatagaatatatcagcctaatcaggcagcatgtatagaaatagggatataaggcgagagaaattgctcccttctctgctcattgatctgatatatcctaactgcataagttcttctgttgcagcattaccagccccaatatgtcggtacgtggatctgctacaagcgctatatataagtactaacagcttgctttctgcagaatccatcggggtacatctacattcccagcaaaagcatccatggagaatgtgtcagctaaccaatgtatatcagtatttctattgcagatgaatgcatgactgcattcaatcaactccgatcaggaccagaagccaccaggccaaagttcatcatctacaagatctccgacaataacaagagcgttatggtcgaggaaacatccacggtgaaagactatgagttctttcgccggaagttgtcagctgcagtccacaaagatggtaacccagcaccacggtatgccatctacgacatggagtatgatcttgggagcgaagggaagcggtaagagattaccccagagacttaatgagtgtagtggaataattttggctaattccaaaaccgtatgtgcagtaccaaggctgtcttcgtccattggggtccttgccatgcgtctatcaaggtaatttgtctttcaactcgcgtggccatgaaatgctgactgtcttggttgcagctgtccatgctctatgctagcagtgtgcaacaattcaaaagagcctttggcctcaacgtctctttttttgcagacagcctggaagagcttgaatgggcggttgtcttgaaggaggtcagtgggggccagacatagatgggtctggggaaatgatcggcattgctaaagtcccgtgcatggagagggattgtttctctagagcaaagtaacaagatagaaatagtagtaggtgaggtgttggatatgaaatattgatttcgaactggcctttgagaacgtgctcaactagattttttgatatgccttggcaagggcaaatgtttgaagttgcatgatgccacatctgtactttcatcgaaccagctgccaaagttggtatagcgcgttctatcgacagggatttatagcaccaatggatttatagcactaacctggcgttgcgtcactccatatgttagattgaccaggcgaggtccctttctttcgatggtcttcaatcactttgtgttgcccattgtaagattataaacccagagtttagaacgagcgatatatatgttttagcaagatcagaattaaaacaaacagaccaaggacgaaagatatgtcaaaatgaaatgaaaatcaagggcaaaaagggtggaagcttgtatctccgcattggggcacgtgcgttatgacatgagtccgatcatcccgccaccctgactttgcaaagacctcccaaggttgcttgtttgcttgtttgctgctttgcatttcccaatttgcatctttcttccagttgagaacatcaggagtgcacggacaagcaagaaaaaccttcgggccaagcaagaaaaacttgctataaagctccccactttcccacccgagaaatccaccacatccatcgaatcgtgaaaatgatggccaccgggtctcgggacacctcggttcgtgaggccaaaggcttcgtcaaggatgtcgtacgaaatgactgggatttcgaggccggcgttccctccccgtcgtctgccgacggcaccctttgccacgaccgtgaagtgtgcgaatggcgggtccgagaattcgacaccccaacctcggaactcgagccacagagctcggacagcgagcaagagtatgatccatcagccgtgctgaacctcgccccgggagctgcaggtattgagcggcgtcgcaaacgccgtcgacagatagacgacgaaatggcatggaacgaagggctacggttatggatggccaggcgcgatgcgtggtgtggtgcgaagactcggcggcagattcgggcggaggaggaaaagcgcgcgttggctggtgcacggacggacacaacagatcagcccgatggcgtggggctaggagaaaatggtgagactttgtctgattcaacccaaactgcgatgccgcctggccagggtagtgagggcattggtgcctctgatctggcagcccagaccgagacttcactttccattgcggaccgggagaaaagcgagcagctccagaatcgagcggatatgacctcgggacagcaagatgatcaggaggatggattgtctaccgcgccagacgagggagttaaacggaaggcctcgtcagagaccaacatcacagagccggatcagaaagttgccgcaatcgtacctactgaacttacaacctccccggccgtggcaggccaaacagaagaggagaaggtggaagaagaacttgatgaaccactttgccccgttgccccaccattcatttcaaacgacaacccaattcgcgcaaccatcaatcccgcaatctacccttcaatctacaccaaggtcgtcgtgcaaggcatgaccccaaccgtccccgtcaacctcgcccacttgaccaaagccatggttcaaggctggaaagcagacgggcagtggccaccaaagccagcagtgacatcgattgtccttgctgatgatgcctccgtgcccaagaaaaccacagaggacgcaccaccgaccaggaggaagaacagcattaccaatgccgtgaagaaagtcttccattttggaacacatcccttccatcgccgcggcagccaggacaccgcgggaaccgggggcccgacagcttgagtggatcctactatttatggatcgtaagtaattgcatagccatcaacgctagtgcaggtcgaggaaatagcttcacctacctgggttgctctggcttcatcaggcgtctactctgggggttctattatgttttctttcgtgctcaaaatctgagcatgccgatgttttatttacttctagttctgcataatgaagaaatgccatctcaaaggttgtacatagtaaagtagttttcacaaattaggacctttttcgcgtcttcctgccgtctacttgagaatggggagaagatgtctaaaacctagaaagacatctaagaataccccaagtaattcagcctgtctgcagtatttctctaaaacaatcccaagacataatacataatattggatgttactacctagcagtcgagttactgacttccccagtgatcgacccgacatagacattgaagttataatgaacacagctatccttaacatccaaacctccttgcccactcagaatcgtctgtccattccgagtcacatggaaggactgggcaccaacccccatagtcacattcgaggtaaaaatccccgctggaacggcaatgctaacaggagcatcattcccactctgcacagtcaaggtagcgggattcgtcaacatggtagcgataaaaatactatcactgagcatacccacgcccaatggcgctgagagggtatcccccgtgcacacgacgcccttgggtgtaggccgataccagtacacgactccatcttcttccacaataggggcttttgctccggatttgtaggctgcgatatagggcttgaacaggttgcgccagccgtcgtggggcatatcggctgcccactgggaagagccatcgtcgctgtgattggctgagtacgggccgatgtagtgggattcaccgtagtctatataactttggttaggagagacttttccggagaatttccaggatatgtaggatagatataccattccatgagattatctcgatcaggcctggctcaagggaaagcatctgttcccagcgtaatgttggcaggttctcgcaaacgaagacccagtttttagtgttgaagtgcgctgagaaccagggtgagacggctgtcatttaagttagtttactttcactcagagaccagaactaggttcaagggttgctaacgggccatgtaagtcttccctgcgagataatgaacaaatctatcatcccagatggtagtcatcgggcctgggatgatactatttcccccgtccgtaggccaagccaaccacgagaaggcaccatcagcgctctgggcagcatccgtagtagcttccgcaggatcttggagatttggcaatgcgtaaatgggatttggcgttccttgcctcactgcatcccagttgaaactgtctccgacaaatgtacttaccaccgcagctcccttgtattgcatctgcgctgggtggcctgcatattgtttcatgtatgctgtgatcttttccgtatccccgttcgtccaataggcaaagtcgaaggagatgaatactttgaagtcaacttgctgggctgcttcataggctagggctagctgggttggggtgtagctgtctatgcttgcacagttcagtgcgaatgcgtcgatgccaatggattgggctgtggtcatgtcttctttccagtctgataactggtaattttctactataccgacctagatatataggatctatgtcaatggtgggaaataggaagtatccaggtgctagtatgctaaccatgaagtgggcgaagacatatttgtcctgcgattgactggtcaactctgaatcgggggctgggatagctaaagctggcaggatatgtgccaacatggccacagcactaaagagggatttccaaatcatcgctaaaagttgtaccagttcttaattgataagttgatttctcaatgatgtgaatttccgtccgtcccttaacagattatatagttcaccccctgcatatattatacgatattatacctcccaaatgcactgaattccaaccaaaatgaagcaagacaactaaaataccaatataaaccttgaacaataacctcaacggcgagtataaaacttgtttcacctttccccgcgctatattgtaacacccgaccttccgtcacatccacgtgagattgtgtagtattcgcaaaccgcgtccacttttgaattaaccctttgcccctgcagcatatggtatcgccgtcaggctcgggcccatatatcacgctctaaagaactcaatcaggtgttgagatgctacagtagtgctgagtatcacgagatgtattctcacatcaatctttacatgccaactgatcgaggcaaattaatatgccgggcatatgaaactcctgggtaaaactcgatgtatggattaacaccgatgccgccgtaaagtacatttgacaggtcttggcctgtggctttttcgctggcccatacgcatgactgaatttcggaatgactaaagaatatgtcatgcgtgaactgctattcaaatcacaatactatcagaacatgacacacgcattgtgctgttgtatttggtcatggtagcatcttgcagtcggcaggaacatcctccaatttgaagagaatgaatagcttctgatagagatgaggtcgtaataaggatgttgataacaacggaaatgatagtacaagatctctgatactaagattatggactcagaataatatatgacgtgttggatccgagacaggcaactcgggggttctgggtcatagcgatcaatggagattaaattccacggagattgcattccatactgacctgcatatccaggccagtcgagggtatgcggccctgattgatgttagactgtttgaactggactcgtttggcatagcccttgcataatgcatgattcggctccttctgaacattctcacctaagccgtcactaagagttgtcatgattatatctattggaggacctcgtacagtaaggaatgcattgaacccgaaggctatgactccattagagtaacaacattgtcaatatggcacagataacattattgattcctttttgatattcgtgacacgttaaactccccctaagaacgccgtgtatataaagatcgaacagaaataaccacaaggtcaagacaataactccagaaccgtcgcacgatcaacgaaacctctcgccgcatcttcgaaaaccttctgcgcttcactctgactagccactagaacagcaatctcaggctcgaccttgatctcctgtaactcatgaccgggacgagtaaagtagtacttatcctgatgacaagaccattttctgagatagagctggagatcattcgaagcgaggttgttcgccgtactaaagaattccgttttcctgctgtcgcatgacggcggcgtagaagggaatatgacacgggcactgctcgacgacaagtctatgtctggatctgtgctctgtagacatctacccacggctttggcgaaatcgcggatccactcgatgtgtgtcagaataccctcccctgcaccagtgactcgatcgatgtaatctaccactggtagcgctgaggagatcatgtctaggaaggcggcaagcatgactaaggttgtaggactttgcagacgatggcgacggaaggcgaccacacccagtgcttgacaggaggctcggcacacaacatcaatgatatctatcacagaagacacacaggctggatccagagtgtctatgttacacagcagggttttgaactccagtgtgatggtttgaatgatgggacggctgagaatccaggcagcgcggttgggaagcgttgcttcgagatacgctggaaacacgcattgcaagaggacggcgcggagagtaggtttgtcgtagtccccagcctcgtatgtgtgtttcatcgaggtgtgcaactgctcaactaggtagctctgttggccgtcaatggcagcgcgctcggaaatgctctggacaaacccggtcaaggtctggatctctttgctggaagataacttcgactcgtagcgtttgagcttcgcaacgatgtagcgagggtcggtagacggcaaagggaacgaagcagggtccgtaaagaaggggtcgatgggtttgatatcgctggtatgttgctgaaggaaaccgatcacgcgttgaacgaattcgacgtattctccttgagctgtctgcgctgttccattccctagctcttgatagttgcttttcatggaagtcatcacccgctgaagcatctcggagtactcctgttttgtcacggagaaatttcgattgccagaaagttccataccatagagctgctcacgcatattagacgataggcttgagaggagagataggcgccgagaaccaatttcctccaatgtgattgtataccggccaatcttcctatccttggagaacggaagattggcaagcaagggatctgtgggacttccattcaatagcgcctccgtcagacgatgttggaacttcaacatcgaggaacgctcgaccagcgacgacatccacatactcataacttggattcggcaatcagaaacaatatgcgcgtccttttcgatacatgtcgcaagaaacagcggtgcaaacttccttgtctgaactgtctgtcgaagccgcgtccatgaatcatcaccgaactcgctcagataattgtcccagtttcggaggccatggcgaatgagaacctgagcgattgacgtccagcattctactacgttgagaaggattatatcctcgggacagtggtcctcgccaaagcagttggaaacaagacgagagacaatcggatgaaaagccttctccacatgttcaataccttcaccaggggaactttgctggtcccagacagcttgaatggcatcccagtcaccgaactcctggctgtcctcatcagtattcactgccataggagcactcgatgtggatgtaactagaaaatctttttgggtgtacgccactaggacctgcagagcctcagatacaacgacattcacgcgcgggagcttcgggttgaaaagtgcaagaagagactcgaaaggggttctcaaaacaagcctgcgtgcatgctccattttcggagctagctgtacagcaatccgcagcccggtaagcgcattgctcaacaaagtctccacctgccgctggttctgggagattgtgcgttcaacaacctgctgagaaacccgattgtcgccggtattttgagcctcaatctctttgcgagcatatgaatgctgttgctgcaattccgtaacgaaataaccataccagtctccaaacgggtcgagccccgaaacctcctcatcggtagaaagcttgaatcgaacaagccttgaccatgaccgcaaattgatgctgcacgcttcacgatgtgaagtggcaggatggaccagattgcgtatcgtctccagtcgagggcgacacccatcaggaacagcccagtacagggtgctgagaagatcgtgatgatttcttagtgcctcaaggtcttcgtgctgcaatggctgttctttcgggtagacacggccatggttgggtaaaagacgccaggcaaagtttcgaatctttttcttgtcatatctcttcgccaagaagcggagaccacttgctacgatcttgagaaatgtgtggaaacacggttctcccactcgggcatccagagaaggattgttatcaagttcgtcaaggaatgaaggtgagccccgagcttcttcgagtttcaggttgtggagggtattcttagcgaagaagtcgaataatgtatccaggataggtttgcattctctccaaccccaagaattaataagccgatgacatctgaggaacaaggttcgacagtagatgttgtatgaaatgggttgtgccttggagtcagactcgaaatggtcgagggctggggcgagaaggcgtttggctaatatccaattgtcattggcagctgtcaactggtaaccaggacgtgcaatcccaagcggatctatttcgttgagcggcaagaccgtaaacatgccatgccatccagcctccaggctacccacatccctttcattgcgaatgattttgttgttgaaagtctcgagctggttatcttcaaagcagcccttgtagttctctgaactgcgtagaagatgtttggtgatgacataagcctccgccgaaggatactcatcgcgaattcccgactcgcggtgttcaggctggttgatttccttaagcaatgttttaaactcagaagaaccgactttcgatgcgatcaagcctgcaacatccttagcggatattttgacaatatccaaagcttcggttgcaatggcagggctaacgagccggtgagaagcaacttggtagatctggttggagaaaaccatgttgaaacatgcaatcttgacgagcccgctcttgttgtattcatcgctagtcagaaaggcagccaacgggtctctcacctgggagactagccccatcgctctggtgacaaactctgtacgatcaactgggtcggtgaaaaccagattttccgtgatgtatttgatcaacaatctgtataacctcgacgccacaccgagagcagccgtaatacctgtctctggggaggtgacagcacttcgctcaacattatcgataatcacatcaaaaacctgcccgatctctgatgatactgtatcgttccaccgactccattggaatgtctcgtctctgagctgaatggagaatgaagcggcatccccatcgaagtcccttcctgtgatttgcaacgaacgagaaaattctccgcttcctatgaatgtacttccatggaaaaatgtattgtcacgtagggatggtactccgaagtcgaccggatagaagcgttgccagttgaaaagcccggcgacaccgaacgatgggggacgtacatctccagtgtgcgtcatgataggaggttccaagtcatcggagactatggtagcaggatctggattctgacggaattcgtcggcatcgagattgattcgtttgggggggtgcttcttcaaccgccgtcgagatacagaggctttgggggttggcgtttgggttcttgcttcagccgagacggtagcggcggcagcagcaacagaagcattcatgggcgaggaattgcctccagtactcaatgatctactgtcggaaacatatcgatccaaggtcaagctgggcttgtaaggtttagatgtgcgctggtttttatagtgtcgattaagaagagacaatgactggttgaacatggcgggtaccattttctggtttctaccagggcctgccaaactggttgccgcaggcctaacggtgttcctcttcaaagatgttatagccacgttcctaggaataatccatgtgtgaccgtgctgctctggttttcgacgcgccgaggacacggccactgggggttggttcggtgggactgacactgcgctagattcgggtggtgcctgtacccgttcaggttccactgtgtttgtgctcgaaacaccagtgtctgcctctgcatcgaggaattgtatccggccgtttttagcattcgatttagctcgagcactgagaatcgaaagattcgttgtccaatgccggttttcaggagctctggaacgcggcgggctaatcctggcttgctgaatagctccccttttccattctcgcaaagactcatttgcatccactgtgtcctccctagaggccaatttcaagaacttctgagtaaggctctgcctgcctccatctttacgtgagcgtggtcgtcttgtcgctaccctgagcagtcgcgattgctctttgagaggcttcgtagcaacatctggcgcatccagtattcctattcgtggtcgctggacagcagagggtttcttggtccttcgtgctctatacgaggcatcggtcattcgggtttgacgaggtctcttcggctgtctctccccattgggcaaactttgtttcgatttcggcctttttaaactgttccttttgtgccgagaacctgttgggttgcgcagaacaggtgcagacatgtagtcgatgcggttatcctcggagatatcacccccttccagcgcgaagggatcttcgaggctaagagtgccagtcaacatctggctggattcattggctacagaggcatttcctagagcatcatttcgattgtcctcgtcgtccgaatcggaatctccaagatcaaacaagcctcttgcctgttgcgttgctggttgctttgagcgatcaccccttcgaatgagcttccgcgcaacaccctttccatccggtcgttgcgaagaagcatggcggtctaatttcaaggatttttctttgtcgttcttctgattcagccgagcatgtgacgcagggagcgctccacggatcattcgttggaatcgtcgaatttcacgttcttcagcatctgacttggtttcttcctgatcactctggctgttagacgagatggactgtacttccccctcattatctgtacccgcaccagctgattgaacctggccagcttcttgtatttcctgtgccctggactttgcaatttctcccggtggcgaccacccacgagggaaccgaaaccctccttccgaggcacgaggggttcttgaggtagatgataaacggcttgtgtggggtggactagacgacaagtcatagatggagacagcgttctgatttttagtaggtgtatttctgtccctaacaccacgaggtttggacggtttgtgtagattatgacgttctttgggagtcccggaatgagatgtcttctggcgctttgccagacgagcttgcgatggctgagtatgctctgagtcatggtgttcccgtccttgcgtggcagattgtgggccacgatgccgttcatgtcttactggcggaagatactcttccaagggaggacttgatggaggtgcatcgggatcatatgaatcttgcccttgactttcatcggtaacctgctttctttcctgtggcggtcggccaaaaggcttgacgccccgcgcctgtagttgctgcgcaaatttgagctgttccagatgatacgggtgcatttggatggcattgcgctttcgaaatgttctttgcgcggcatgcggcaattctcgaaatacttcttcggggatatcaaggtggggtaagacatcatctgggttggcatctagttcaacgagcactgtttgcggtagatctgcctccttatctatcagcgtttctgcttctgcctccatcataccatctgcgtgtatctctgtggaatcattggccgacggagaaccaaaggatgatggtaaagaagataatggggagtcatcttccgaagcctcctgtggtggtagtggtggtggtagtggtggcgcctctattggttggacacacttggccgcggtgtttttcttccgagttggctgaggggtcaacgccagctcgtcaggcgaggagctccgagtgcttgatgttgcatcttgtgattgggacgaccgtacaggcttcaaggccttcggggtagactcgcggctcgagggcttcgattgaggcctgtcatgttcctgtgatgacgttgggaaatcgtatatgctggtggtattattcacgaatgcattggtaatgtgcagctcgctgttgcggtgtttcgttgatttcgtagccgatgatcgaagtccgtaagtcttgcgccctcttcttgggtttggtgtcgtttcgtcatgcgcaacatttgtgaggtggggacttgttcgattcgtgtgtcgacgaactacctcctctgtatctgagagtgtgatagagccattctcggctcgaacgtgctcgcgttgtttcttcgttacactcgtcgccccttccttcggtgacgatgaagggttgtcgatatattcgatattctcgaccacgggactattttcggcattgccattcttcgcatctaaagaatcgaagccgtcttcctcgtccgagtcagggacatatcctcgttgtcgccatgattccatttgcatcctcggcggggatcccccatatctctaaacagtcattgggcggtctcagggcgatgaaaacgtgagctaaataaacctcgggttaaaattcgcgaaacataaggaaacaaagcgtcgaaaatctattcaaactgtctgaatgcagggcgtttgatcctgacgcgtgccaacggagcaatttagcagacgcgccggctgctaatcagccaactgataaccgatcttttgcacctccgcaacctccgcaacttccccaactgcaaatctcgctggtctaccccaattcctccgaaatgagtcgcaatctcttccctgctattttcgctattggcgtgggagtcttcacaggtaattataccccacagcaagaatggtataagtcgctgaattgatccatctgctctaggctactatactttccaaccgacattccagcaacttcaatatgagagacagcagtctcagaagacctcgcctccgtctgatcctgttgctctaaagcaggacaccagtgctctcaccaaatctgactttcagcaagatcccaagtccactcaatgacgttaaccggccttccccttgaagtggcactgggctgatctgagtatctaattgggaagacagtcttccgcctcaggttgacctctcttacctctaccaccaggtaacctactccacttcatatatacctcaacattatgggagccaagtctactaagcaatgtgagtacatctcaatctcacattcctagtcaaaccaggattcaattttgatgatatactttcccaggccctgcacctcatcccactgccccagttgaatctcacgggtctttccacgataaatggtcagcttacgtccagagtcaagttgaccaaatttctctgaatttcgtcgtggtggaagcgaagagagagtcggcctttgctcaagggtttacccagtgcttggggtatatgggcgggtttgcatgctattaattagattagatgctatgaatctgactcattggaggcattggctttgtgcataggctttgtggaagagacaacaagcaagatttcactgtctatggcgacgatattgtcaaatggtagtctaacaacttagcttcttcatttgtaaacaagccatgcatctcgatgtctctgttacgtctcctggcagcttataggcccggaagctctattcaaagcttcctctttacgttcggttcaacatctaaacacctctcgtcgacacatcaacctccaggccacgcacctacaaacaatcaatcataggcatgattcattagatcataaatgccaacgagatgagatcattctagctattcctgtgcaggaagggaaagctttccgccgtcacgaattttgcccaatccttttagggcatcaaccgacgtctttcgaggtaagggcaaacaaaaaccagacgccggagtggaagaagtcgagtagttccatcaaacttcgataatacgtagttatttaactcgttagtatgattttcagcaggtatgtatatgatacatcgcagtgcatagcggccaaccactagggttttattgccaacataagattgtctattattgtagagatgcgatatgatttgctaggattagagcagccacggatcatcaagcagctgccttgcggtcatgcgctcttcgggtagccacttgagcatagacctaaggaaacgaagaaacgattccttttcacagtcggagagtcgcatttctagactttctagggagtcctacggcatgaccgcgtcttcatgagcagtccaaatacctgcgataattttagcacgagtcacatcctgttaattagaactgaatgctgagacggaggtctttaccattgcgatcaaagcactgccccattgtttcactgcgctggataaaatcaggcagcggtgggctaatcaatgcgaccatcgacgcaagatgtttgaaggggtcatagttgccttcgtcatcgaaaatattcccaaatagatgtcgtccttcgaagagatcccaagtctaacctccattagcgggagtataagaaaggcttcaagcactactcgccaaggcacctatgttccaaatatcaacagcactccccaggtcatctcaaatatgatctctggggctctgtagatatcaggctgtacaaaaggccccgagttatgtgttttcccgatccttgcctctcctagatcacaaaggattggaagaccaaaggattggaagaccgaagcttttacctctcaaaggtcggcggaattgtcgactttgatatatggtacgcgttccatctatgctcttgcgcaggatcgggtgcctgatctctttatccgcaaaatcggccagcattgtagtatcctccaggctgagcattacattgtcggttttgagatctagttcacgttaggctagaattgattccctgtgttcgagaggagatgtaccagtgtgaataacattagcttcggtgtgtaaatagtcaagtgcgagtaataatcgcttaagcgtcattttgaggagaggtaagtcaaagggccttggatttagtctcatcatctccagaagtgtcatatacatcggttgtaagacaagacaccggtgactgccaccatggccccgaagctcgaaggagtcatatagctcccgaagcatcgactgtcatgggtgtgataaattgatttttgcaaggtgctcgtaaacccgaaattcgcgatcggtcgcattagggagacctcaaagtgatgtagatacctttagtacggcatagctttggcttctgagctagtttagcggtaggttttcttaatctcgagtggtcacgtactgaatatcgtgacatagccaactcgtcgagtgggctccataaccaagcttgccggtgacccgatacctatcatcgaatacctctccaatgcgtacggggtagaattgcctcgggtcatagtgaggaagcgtctcctcgtcgatgagggtttccactggcaaactgacgaaggaccttctagaggtgggttgaaaggatcgatatgctattctggaggcagatatgaaggcgttcagtcgtgaagtcaagcgtgaagtcatgcctgacgtgggtatagcaaggagacaggagagcgttcatggcaaatgacagctcgattgccgcccttcataagaccaggagcacgatgtctggtcacatgatcctctgctagctgcatatagccttgaccttgacactgtccccgtgagtgtactgcagtccataagtgtggatgccctggctcaggaggcattgcagcgctgacgatgcaatatcgccctgagcatgggatacgatgtgctctcagtgcgtgctcattaatatatgcacaaagtagtgttaatcccaagtgtcttatactaggccagagccctagttctcctagtctcctcgtcgctaaattggcggccataaggcattatggcattaggttagggcagatcgtaacgtcttaatagggctatagtatatagcatcaagaaactgaggaagtgcctctcgcctgttcccaatgcaatatgctttattggagatcggctcttccccacattccaagcctggcgcacgcggcgccatatgtttcgctgggctacagtcgttcaggtattgtggccgttgtacatataagactggcacaacggcccgtttcgaagtactggtagatagtactgtagtgaggctttccgactgattggatataaaagccagttttctcggcaaatccatgtgtatctggaaatatttgaaacaaccgatgtattgcatgacctttaaaccttgacatctggaagatacatgttttgagcgccgttcgcagcacacgcagaaaatcaaccctagtcccttgcaatgataatgtagtccattcccgaataccttaacagaaaatccccccataagcgccaatttattgtagtttctgcatgtaaatcaaacttcttcaaccattttccctgcaggaactgtaggtgcaccgaacacacgcccagtaggtgtccccagccattcttctggcacggctactttacagccatttgaaccgctgatccagcgtgccatggtagggtcggctttatcggcctccgcgccttcttggccgggggtgccatcggcagcctcggccgcagcagctcggccacgccgcttaggggcctgcttctttagcagtcgattgattgtgtccatctgttgatcaaaattagcggccgttctccaatggatatctcgaaggactttttgcgcataccttctcctcttcattccgcttctcacttaggttcttccttcgccgcgccatctctgcacgacgcatctggcgctcctcggcagtcaaatgcttcttgacctggggctctatttttttagttagcttcggtttggacaaatggttgatcgtagtttcccacccatgggaagttgcaagaaatcattccccagatttcctcgctggcgcttggtggttttgccactttgcatagcgagggcatcactatccatgtcgtcctctattccatcatcatcgtcgagttcatctagatcatcaacattgacgtctgggactgcactttcatcctgatcttcaccctcggcttcggcatcttcatccgtatcggagatgggctcttcctcgtcttcttcttcctcttcgtcttcgtcttcttccattctgatctccttggcctccacactcttgggcggcttggcgcgagagggaggggtgattttaccgcgcctggtaggcgcctgaggctgcacgtcatccatatcgatgtcaccatcagcgtcagcatcagcatcgtcatcgtcatcgtcgtctccaggtgcatcttcatcatcaacttcgtcctcttcttggtcgtctatttcttcttcgtcgcttgtagcaacttctacaatcttctttcggttccgactggagcggggtcccgagacaataggatcatcccgaaacacattgactgagcgccgtccagcagagcgaccagcacccgtagcttcccgcaatttgctagaggccattttgagagtaagccggagagatctctttcgatctcctgaattcaatgaagatcgagagatggaaactaaagcagacgcggaaacagatgcgcgagtttgtctggtagacctggtggccatgttagcctctggctctggggattcatcatgtgcctttcgcgatcgaagggatcgacggggcgacatggtggcggttttatcgagtgtgacagaagtcgttgggaagggaaaaatgcaaaaagcagaacagcaaaaggaagcgggagaaggagggtaagtgtgtggcagtaggaacttaagccattaagcctttggcgagaggggaaggtctggagagagaaagagggagagagagggaaggagggatgtccaatcacttcatccactgagtgagacgcggagttgcaaaccgggaagatacagattgcttttctatacgggatgtttccactgcgaacaaagcgccgttacagggaatcaggcttggggttgtttctcctggcttctcttgggggcgtgtttgggggctaaccccgggcttgggcagatcggaaggcacacaaaaacaacaagatcaacgggggaaaacgccatactcacaagtacttttctctaaagtttcaaattctccaggtgtccagtcgctgacgctggatgaacgaatgaagtactgcacggtccattctgccgggcggtatcgagtatatacggatgccattatggaggattgtggtgatctttcggtattcaattgatctcgctagatataatgtataaggacttattgtagaagacactatagccgtcaatagaacccgaaagtcaggtggtatggcttcgtctcacatacaggctattttcggtgaacaaggtactttggatattcacatctagcgccctaaatacatttaaaatacaatatttgccattcatattagattattcttcaatatcatattctagtacaacgtgaacaattatcaatgtgatctcaagatgtacatgtagttatggcaaatatcaatgcctgaggtgtactcggccttggaacagccgaggtcgggctcacatggcaagtccggggaaggttccgtctcctctttacaacaccaacgcctttgctttctcatatctctggcaaatgtgtcagatacctcatcatgcctgacgacacatctaaaacagcatctattccctcatggcagaggcccaataagacggccgaggagtcgccatcgccgacctccgacgatgcgcccgcaactacagccacacctcgacaaaccctcctagaccaagcatccaaatttctagaagacgagtcaatccgcgatgcaccaacagagcgcaaaatctcattcctcgagtcgaaaggcttgagctcagacgatatcgagcaggtcctcggcgtctcccgcaatgcagagacgagcagcagttcaaccgcacccaaggacaagacaccggaagagacaccatctgcctcgcccactcaatctgaagccaccccttctcctcctagcacctcctcgccaccctccaacaccatgcctcaatcgcgcccagcaccagcgccaactcccgcctcccgcgacgtccccccaataatcacctaccccgaattcctcttcgagtcatccaagccgccaccactcgtgacgatgcgtagcctcctgtacacactatacggcgccgcaggcctaggagcaaccctctacggcgcaagcgagtacctcgtgaaaccaatgctagcgagcctaacaagcgcacggcacgagcttgccagcacagcagaagtgaatctacaaaagctaaacgacaagctagagaaggcagtatccgtgatcccggcggagttaacggcgcgcaagagcaaggcctacagcgacgaagaagacgacgcctcgtccatcacctcggacccaaccgagctgttccacagggacgtcgcaacacagacgagtccagagccaactccagtacccagtactgctggcccggtggactcggcacccatctccccctctacggcggtcaataaccacgtcagccgcgttgagtctattacctcgaagctgcgcgagatcatcgactcggagaagggtgcgagtacgctggatgactcgatgagtacacgtctcgcggatctgcatcgttattgtgacgggttgatttacagtgctcctgcgtactcttctgggtcgacgtacggggtttggaataccaataactcgggctcgagtgaaagcactggtctgcggaagggggaggacgaggctattgctgggtttagggcggatattcgcggtgtgaagggtgccttgttgagtgcgcgtaacttccctactagtcggggtggacgtcttcccatcggtggacggtgatggggcatcgtggggttttggtgcgactgtacgaatgtacgaatgtatatagattgcaacggattttctaagtggtttacttaggtatacctaggtttatacagtctgtatcttcattcatttgattgcatctactagattataacgagggtgctaggatatatattatcatgatctgtaatgcgaaagccatatcctcatttgattcatgtctatctagcagtctgtgtcagaaggtaccatatagcgaaataaccgaccatactcaagaaacgtcggaaatatttcgctttgctcatgatcagacttatgccgcaggggagaagaggaacggaggaaaatacgcaagacattaatataaaatggacaaggaagatgagaaaatttcaagcaacgctgaagtatagagaaaaaaggccagaaatacataagttataccgcctttaacattccctcaacttgacaagaatcaaatgtgtcatttacggagtagcgccgctcatactaatcagtcgcttcacaccgacctgttgttatacttgttagtgaccgaccgtttagtatcctaggaccaaagttcactcaccatccaattgccacattcgtcagtccggttggtcatgatatcaacatgaatagcgagggcggtattgtaatcacgttgctggagtgcacgggccaagttggccatgtcctcgatggtgttcggcttgagcaagtcctcgttgttgaggtgatcaaagaggatgttcaagcggcgctcggcatcatcaacctgtaccttgaatgccgcgggagcccggctcttgacgcgctgcatgtctgctgatagaatctcgaagacaggctgtgcgtttgcaggaatatgtgaacggtcaccgggggctggaataagggtcaattggctggaagtaattgtttgttaagtggtattactcacgatactttggagccgcaggagttggcctctgcgactgggctgttggaggtcgaggtacttgagacggcggcgggatgccctgggccataggtggaggctgtgtagcaataggcgtggtgggtccgtatgggtttgccgcggggggttgtgagaccgcttgtggggcgtatggtgaggcaacggcctgaggagggggagcaaccgggccacgagtgtgcaattgcgggtttgtagcctgggcagctgggctcggtgcataccgattggttgggggtggtatgctaggaggagcattgtagggcgacgctccgcgaggtatggacgccgagggacccatggttgacccctgagtcaatgacggtgactgagggagagaagcgtatggattggcagggggcggcggggaacgcccagggacctgcccaccggatagcggcgacatcatacgcggtggaggaaccgaacccgccttcggtgggggaggcacggatggtgcgcgcggagcaccaaccgggggaggtccctggaccagattcggtgactggttggggaaaggagaagcgatgggtgcagaggctgcggcaggagttgaacggcgaggtgcaggagccttcgcaaagccttctggcaaatcattccatgcaggaaggccagtggccgtggtgtatgttgtgattgtgttggctggcgactggttagatgacgcacgaggaggtgggggaacgccagcacccgtgggctgttgtccgccgaatgcagatggtggagtataactggtaggtctcatgccctgggttggctgataaccagttgtcgatccataggcgcctcccgtcgacatagcagcgtaggggttgctgggctgagctaccgaggtcgttggagggccatatgggttagcctgctgggaaacagcgggcgcagtaggcgcataaatgttaggagcagcaaccggtgttgaagtagcagcaggattgtaagactgctgcggctggtataaactgggctgttgcgggaggggcttaaaggcaggtttggctccgacagaggcttgggccttctggggtgcctgtctggtggcaagcttgatgcggttgcgcgccacctcagcttcagggtgcttttcagggacaaggtcaaggtacttctgagcaatttgcaaacgtccatgggtagcgacaacatccgcatattcaatgtacttgtcatacaagacactcaagcgccaatccgagtccttgttccgctctgtatcctggaacttggtgacttggcggaaaatggtaactttctcgatcagaccctgtagagcacggacatggatagagaaggaagagttgtcggtgttgctttcaattcctttctgctcattctcgcgaagctcctcgacccaaatgttaacaaccttctcaagcttcgagcctgccaaaaagcagaaagaagcatccttgcgggcgctcttatcgtcgctgttctggacctgctcctctagccggtcaccgagagcatcacagagatcagggaattccttctcgtcggcaaaggtacacaaggcagccataacttccttccagttggacaaatcggcattatgcaccacatcccacaggttcttaccgacaatagatgcgagcaagcgcatatagttcggaccgccggcctgcttagagaagtagtactcctgtgccttttcaatgcattttgggccgccgcaaatagcaatcatgaaagcatcggacattttatcctcccggagggcaacgtccagagctttctcaaactctccaaggagcaaagcccgagtaatttgcttttccgcctggctttctgaaccattgaaaatttggaatgggttgttggtttgagcacccttagaagcagccagttcagaaaggaagctgtcaccttcgggattgggatcgaacatggattgcaaacgcttgtgcttcttaaccttagccggtttggcggcggcaccgttagtgtcctcgccttccttcttgtccaagccaagctgcgcaagactatcagcggcctcatcagcctgatcctggaatcccaggtactctaccaagcccttacgtgggttttcggaaattaaagcctccatcaccttccagtctgctttttctgcttcgttggaagcacctgaagcgcgcgactcacagagagtacgaatatcgccctctttcaacgcagtctcaaagctttcagtagcattgccaacgctctcatcaacctcgaacgatgtgattttgacagtagatgtacgtgagcccttctcagtcagaccgaaggaaacgacccgacctccgaagccaaatgtagcaccacagggccgctcaagccagcgaggggcctttgggagagagaacttggagacttggggctgcgtttgcgccttattaaagaagtcttcgccgtccaaggcttgattgtgatcggcgatggcctgggaattatcggtcttcgtgttctgcagggtctggatacaaatcttgccatcaaaggacgcggttgcgaagaagttcgggttgtgggggttccagcgggtctggaaggtccagttcgtgacaatggggaactctccgtatgcttcaccggtttgcgggttccaacagatattacggttatctttgccgcaagacagcaggagatctggatcatgctcgcaccaagaaagcgagagcacaccggattcgtggccggtgagtgtctatacaaataatatcagtattaagtcacatctgggctctgatagagtaacctacccgctccggggcgtgggagttgcgcagatcccagacatagagcactgggtctgactccagcggtgacgatgtaataagctttgtgggctagacgtgaaaacggtcagcaatcctggaataactacgtgggaagtgctaacgtaccctctcggggtcccatgcgactgcgctgacagccttccgggccttgttgttcagtgtcagactctcctttttcgtcttgacatcccagaccgtcacgaagccggagctgctaccagtgacaagaatgtgaggaaccttcctgttccaatccaagcagtcgatatcatctgtgcgggccgcgttgttgcccaaccggaatgggttctcgatgttgtttagatcccaaatgaacagctatccagcaattagccacatattcaacctatcctcaaaccgcagcctacctctccctttgcgccaccggtagccagaaggttcgggtgtttcgggttgaactgaagggtcttgatggcgccgctgtgcttagtggttcttgagatcaacgcatcactgaaattgaacgattagcaaatgtcaccgggatctggttcgtatgtagagttcgaccaacctggatccagcaagtagcttatcagcatcccacaactccagggagccattctccaagccacccgcaatcacaccccgtttgttgtcttcggacgttgtccaggccacatcattgaagctagttacattaatcggtcagcatgctcatctccattcaagttcctaaaagcacgcttacccggactctgtatcgagcttagctatgggctgcagctcctcgctcgcatcttcacggtcaaggcccaaatcccacagttcgaggcatgtcttgttagagaagtcggcatcgacagcgccagcgcgagttccagttgcgatcaatggcgacgcagcgccaggcgaccaggcgaacgtggccgtccttgggatttccctcagacgcaccatgatgatggcaggggaggtatgttttggtgaggatcgagaccaatggagtatgtgaaaggtatcacccgaggaatagtgaaacccaaataaatagaaagaagagggatcaagaaccaccccttatgaataattgacaatggggtgatactctagatgttccaagtatagcagtaaccaagtggcctcctggacttggagggaccggggaacgcgcgctagaccgcttttagactcgccaaaacacctggcacttctccgaggtgagctgcacgtgatatcaatctttcggtctggtttgatagcaacgtacagcttggtttcagagtcttgaacaaaagttttttttgccgttgaactccctttcccctcacatcttctactatccgtgcaatctcggcacatagccgcccaaatcaaagatcccccaatttgacccgaaccgcaactacacataatgagcgaaaccacgcggctcaagagcaccgtctacgtgggaggtcttgaccaaggggtgaccacgctcacacttgcggaggcttttgttccattcggcgaagttgttgatatctcgctgcccaaaccggaccaacccaactcggccgaagttcaccgcggatttggatatgtggaatttgatctgccgcaggacgctaaagaggcaatcgacaatatggatggcagtgagatctacgggcgtacgatcaaagtcgccgctgcaaagccacagaaggatgccaatgaaggactaggcagcaagactgcgatttgggagcaggttcgttgggatcgatttcatatctaactgtaacctatactaaccgatgcattctgtaggagggttatttggccaagcatgccgtcagcgaggaggatcgggaagcggcagaggaggctcaggctgcaagcagtcgtccgcaagatcctatgcagggattggaacaattagatgttgctgggccaaagcccgagtgatgcacgctacactttacgatagctacgacgaagatgacaaacaaaaagcataagtcctaatttgccaattacaccatcaggattcaggctcggacagccggaatatgtacacgggctgcaatttcgagcccattccatttcttctccattggtctttctcaaatcatgcccatcggcttcaaattctcctagttcaacaatacaagcggcaataatccaaaaactgcgcgtcgcattctgagagctcaaagaaacatggtggtacatttagtagtcacggctctcggggctgttgcggtggagacgcagggtcttgtcggtcagcagcttcttggtgcaagagtagacagcagcgctaagggcgacactaagattgcaagttagcatcagggaaagacatgtggttggttgccagtaaagcgatatagcgtgataaaattccggcatgcgtcgggcatgttttcccggaatcaagcggaagatagtatcaaagagggagaaacatacgcgaggacgaagcctaacaaacagaccgttagcctaatttccgaccgcaaaatcatgactatagcacataccaatagggagcaactcggggggcacacgcttgagctggcgcagacgctgggagatagtgtgggctgtaggtgaattgttagttcaatggcagtccccataaaagtaagtccattttatatggctccgtcaatcaccatataggtctagtgatctcagagatacataccactctggggctccttctacagacataagttagtaaccgagggatcgtatgatcacaacaccattttcgagggaaagaacatacaggagtagggaaagcaaaggcccgagtgggctgcatccgcagcatgcgagtgggatacatagcgagatatgtgattcaacctggagtagcagacgaagagtgggatagaggacgaggttggaacgccagcttccgagaacgtgactggctcgggtgtaaaagcgagacgctcagtggctctcgcttgaccgcccgcggtcatatccggcacttcacagcttcaatcacccaacgtcgctcttcccggctcactttctcccctcctctgtttccactccactccaattctttttcacgtgtgtcgtttctctcgaagctacacatcgcaaatatgggtgctattccggaagccgaccccgatgaggtcctcgagacaaagcccttcaagttcgtcactggtaagtccactaccccctcccgagaaaaccggggcctggagccctacggagagtcaatggctaatttaattgtagctggtgcgtaaaccttgatattttccctcgtctttcgctcgtcgcatgcgcgtggaccgattttgcccgatcggctgatgtatggtgtaattgacaattttcgattggatcgcaggttacgatgctcgtttcccccagatgaaccagtacgtgataagcttttgttttggtacctttttttatttatctaacttggattcacttcacaggaccaagcactgctggcagaactatgtcgactactacaagtgtactactgccaagggcgaggacttccgtccctgcaagcaggtaacttcgacaccgacaatattctcaaatctcagcagcttctaacggcttctctctcagttctaccactccttccgctctctttgccccaaggcctggaccgatcgttgggacggtcagcgcggtacgcatctagaagtctcctcttgatatatgcttattcatactaacttgtactaacagaggctggcaacttccctgtccaccttgacaagtagataaccaacagctgtttttggttggccaagtgagccgtgtcaaattttatgtatcgacaagttccaatgtactctactgggtcacgcggggacacaacccctatatttcctaagtcgttccatccgtataaggcagagagaaagttcataaactagtcgtattgtaaaatcatttgtgttgtagttagctgatgcttgttctgacctttgaagcgtgagcagtcgcaacatatctttcatgtagacgctcgcagtcattgctagctgggaagataacttagaattgagtacaatccacgcgtccttgcggaagtgcgttgaatgcgattcagtgtgtatgtatctaattctatgtaatcccagttccgacaagaaataatacatcatccagcacactgtacaaggccatggggccatgtaatagatatgccccaaggccgtctccggccgttagtcgaatctctgatgaaagaaaacccgaaagaatgcaagctatatacacgccaaattgaaaatggtgtgagtcagtctcaaggtgcaacacatagaaaaccagagagatgacaacaaatcgtatataccgaggatatatcggacagaggcgtagatgccgctgtaagattgggaagattcggcagggaaaaaagtacaaaaaggaatggtcactctttgtatctttaaatgcccttcagcttgcggtagagtttcttatgctcttcgaggaagaggaaagtggcaattgtatggggaccaagacggatgaagctaggtacccagccacggaaagtccatccaaggccttccttacggcagatatcacgcaggagaccgacgatagtatgaccaccgctatccgcatgagaagccgtcataatacgagtcttgatcacgtccacggggctgcaggcagtggtagcaacgaatcccgccatgaacgaggctgtgaagtgtgtgcctagattatcagccatgccggctttctccatacaaagacccttgaaggtgtcgtaagtagctagctgcgaggtagtcataagaatcgcgcgggttgagttaggccatactccgcggaagagagaaccaaatccctctgtccgggtcatctggatgagcccatggattgcgtttcggtagtttcgtcgctgggcgggagggagggacgcgtcgtgttgcatgcgcacattcatcacatcggccgggttgcctgctatgccaccgatgaatcctgaagcagaggcaatgccgatgagagtaagcaggcctggtgcggcggctgggtctgaggtgggcgggctaatgcgtgacttcaattcttcgtagataccgaaacgcgtcgtggagtatgtgatctgacgcagcatcgcggctgacaactataccatatcccatccgtccttcgttagccaactgtgcccgtttactgtcatcgaccggattctagggtcgcacatacaccactatataaccccgtgacgccattgtgcttcaggatgtgcacaaacgtcccaaccatattctttggtccatcgggcgcacgagtctgtaaccggacctattgcgcaagaaacaaatatcagtgtcggggcttggaatcggggccacgggccattctctcggacaaccggctaggagctcctaaataccttgactaagggcgtagagttagcagatagtttataatcgagggagaaataagagcatacctaaatccaaggggtgcgttacggccgccgcgaaacaggaggccgaacctccaaaccaaaacgggtaatgcacctgcttcggctttgactgcgcgggctgaacgggcacgactcgggagtgaggaggaacctccaacatcttgccgctgtctgccatcttgctaggaaacaagacccctaaattatacacgcacaaaaaaaggcggggagagagtgattcaaggggatatgtgatttattttttttactggtcttttctcggcttttacgaacgtgacttgacgtaaatttttggccctttaaataccgacggagacaaatcagacctccgaaaccactcggccagtcgccgaacgtgaaaggcagccaatcagatcaagcgttttgataggggctcatcgcttgcaccaatcaccttctcgggtttgcgccgaacaatatcttgtatggaacatacagtccctcaggcaccctggatatcgtccttgttcggtcgttgaaatggatgccgagggtatcttaatccataccgccgtcgtgctaattgcttcaacagagctgttatgacgagatcggctatcatgcggatcttcggagtttttacggatgttgggcggttggcactggcgtcggactaccgagtggttctacaggacaactttccgatgcatgaaggctaactagacgggattatggttgtgatgtgatcagggtatagaaggtataaaatatctacttcagtttaatacgttgtttcgcagctgtctcggcgagggtattcgtatttagtcgttgtcgcacaggaaagaaaagccaagagctgggataggatgtattatcagttaaactacttgcttttgttcggagccaagtaaatacagtagaagaggtgtataacttataaagcaatgcaaactgcatagtacatactccgtagatacatagacaaccttcaatttagacgtgtgaaggttaaaatggctcggactaccagctgtagcaactgtaaataaatccaaatacgcttaaatcataagcctcttctcctagaaagaggtaaataaatgctgcgttgacataactcgttgtccagactcaacaaatacacttcgggaactaattttgccggcccgaacatgtgttgatagtgttgatggacaaccttggaattctcacaacgtctagctcaaccatgagactatttgctactggtcgagccctgcgtgcgagcagtggccgttggtcaattgcctcaatccgaccccaaaccgccattccccgctcgctcccactaactcccattctctcccgcaaccgcgaatggagctcaaccgccgctcgccggagtgaacagaaagcaaccactacctctaaaataccccagcaacaatcgagcctcaaaatcgaaggagagacctacccaaccgaccagtggaccaacacccccgatacaatcctatcccatatcggacgacgactctatctcgacgagaaccaccctctcgccattacacgcaagctcatcgaaagccaattcgcagccccaaactatggcaactactcagagaagaacccagtcgtctcaacgagacaaaacttcgacgtcctcggcttccccgcagaccacccgggccgcagtcgcacagatacgtactacgtgaacgacaagacagtgctgcgcacgcacacaagcgcccaccaacaggcctacttccagcaaatcgcccgcaacgagcatacccgcccagaggaggtcggatacaccgtgatcgccgacgtctaccgtcgcgacgcgatcgaccgcagccactaccccgtcttccaccagatggagggtgcgatgctgtggaagcggcccgcgacgaacccactcgccgcctcggccgaaacagcagcgaggatcatggcggatgtggagaagatcccgcgccacgacgttgtggtcgaggaccccaacccgactatccacacgcagcggaacccgttgcaggacgaacaccacagcgccgaggaggtcgaggctgtggctgcgcacctcaagcgctccctcgaacggatggtcattaaggtcttcacggaagcgagcaaggccgctgcggcgagtagcggtggtgcggagcaggagccgctcaaggtgcggtgggtcgaggcttacttcccgttcaccagcccgtcctgggaactggaggtgttctggcaaggggactggctggagatcctaggctgcggcattatcaagcaggatctgttgatcaattcggacgtgccggaccggattggatgggcgtttggactgggcattgagcgcattgctatgcttcttttcaatatccctgatattcggttgttctggtcgcgggatgagcgattcttgtcgcagttccgcgctggccatatcgcgcgcttcgagcctttctctaagcacccggcttgctacaaggatgttgctttctggttgcctcctgcggctgtgacgggtggtaacagtgctgctggtggagccgtgcctttccatgagaatgatgttatggagattgttcgtgggattggtggggatcttgttgaggatgttactctcattgacgagtttacgcatcctaagacttcgcgcaagagcatgtgttaccgcattaactaccggagcttggagcggactctaacgaatgaggagagtaatgaaatgcatctgaaggtccgggaaaagttagttggggagcttggagttgagctgaggtgagtttggagattgttgggctatactttgtactatactgtgattattatggagaacatgtaacatatagcattcctctcattgaaaaaatcgatatatggataccactcaagttctaataggtacagactatagctagctttgtctttgattagggtctaatttagggtaccgaaggtggaaggataatgaagacactagaggttatgacaatgcctctaagaagtgtgtattatacagtgaggaggagagaattatcaggggacgtagagctgcagacgtcacgaaacaagtgagaagacaccaccaacatgagacattccgtacgcctccagacacatgcaacaagggcgtatcatacagccgagtcaaagagacgagcagaagatagtaaggaatagtaattttcctgggtccaaaagccagccgtatccgagtataaaaccctatcgtgatcatgatgtatgacatatggtacaaagagaaggaaagaagagtgaaaaggcaggaaggtcgaaggattaagaatcgaagttattgccaacgatttaagcgttcttgacgacaccgaccttggcagcctgtaagagaaaagaaagcagttagtcaaaatattccgcaagaactttggatcttaggggctagcactcacccgcagaacgcggccgttaagacggaagcccttgctctgtacgtgcataacatcaccatcctcaagatcagcagccggagccatgaaggtagcctcgtgcaagtttgcgtcgaacttctgggccttgccgtcgaccttctcgccggggtcgaagcgctcgaggccgtgcttctggagggtgttcaggaggatttgctgggtcatgttgagaccggcgacgagatcgaggaggtccttgttctcttcgttcttagcagcgctgatcttctcttcgggcacagctagcagcgcgcggtcgaagttgtcgatgctatcaagaaggtctttggcgaaaccctggatggcgaacttgcgggcggcgtccatgtcgcgcttgttgcgctcaacaaggttgcgggattccgcgacggagcggagccatttgtcctaagaggaagttttggttaatattcatccgcgaaagagttgcggagctacccgtagcagtaagtatggggaaatagcttaccttgaattcaatggcttcctttgtcttctgttcgagctccttcttgatgggatcctcggcctctgcgttctctgcactctcagacttctcggctttctctttcgcagcttcggtagcttccttggtctctgttgaatagagacgggtagaccgggggacgaatggccggatagccgggatacgcggttgttgtgtagtccgtcgcagcgccagcgatgcggtggagggggaagaggtagagaggatggagcgcgcggcctgagcctgtctgaggagggttcgttggaacattataaatgatgatgtgtggaattgagaatagagactcggtgaatttgaagcggaaccatttgtcctcggacaaatttgatcgggaatcacctgaccttggcaaggaaaaacgctgggccgaggggatcttcttttgacttctctacggagtagagctattacgtatccctaagcttgggaagtaccttatgtattgacttgcaaatatcgcccagtgggctatttgcacctaccccgagcatacgaaggatgtatactttattgatcgcctgggcatgatagtccgttctacttttgaagcatgatcattgtgacatgtcgctcattgggttatttcgaaaacgtattaagctatgaaagacattcctggaaaagttcgaaatgattctcaacagctcttctgggatcagacgttcggttcattttccgcatgggacataagaattcgcgtgatggcacggccttcctctcgatgctccttcacgttatagtccaacccgtaggcgagtacaattccccattcagacatgaatctcttcgtcaaccaacggttttcggcccatgtaagcggctctacgccggaggctcgcatcagaccggaggccatcaaggcttcaaatctctgccgctcatactgggaccagaaggcgtgaatcatgtagcgcccgttagagcacaagggcgaaatcccgaactcatggccgagtggaggcgcgccaagttggacttggtacagcatggggccttcacccataggcttgaagtaggctgcaatgcgaccattggtgttctttaatataaaaccggagctatctggggcactggagtcgcatatgatagtgtagtcgtcttcgatgggccttccgatgatgttgcagagcattgctggggtatggagaacgttcttcaagcagatggagctatgcgaatccagatcggtctgggttggtaagctcatggtggtgagattgacagttcccatcccaatgacttcgaccatgcctccagctatatccgtgacataagacctgaaggggatgtagtctgtaccgaaccaacagcgatctttggcagtactggcctagttagatggatggatttggccctgcgaggcagaaaatactcactgcgtgtctgagttgttggaatagacccaggagggacatggaggaggcagtctgtcgggcctcacaggcatcgatgccatggcgaagcaattattcgaagacaagcccgaggaattggaaatgacgttgagaagttcagttgcgattctagcaaatccagatacagagagatccgtattctgtcttcgccagatgaagtggaatagggaaggagcgagatgagagggaaccagataggaaggaaagaaggaacgaggaagcagcccgaatgggtctgtttgtttgtcgtgcacaatcgcttgcccgggaagtcactgtatcctcagacctcaactatcttctccatggctgcattacaagtggacaatattcactgccgttagggaccaaggatttctcccttatagacagactcggcattctacactgtctcccagacgtgaacatgaacaatggccaatcccatgaagtgatcataatatgcgtaagctatcacttatcatatgaatgaacaagcctgatgatgctagttccgtcggctaaaatatgattctcttcctcgagtttatagcctctccatcgtgggagtaaaactgtccagatataccagtagagaaccccagagagcatactgtgtttgttagcgaggtaaatcacacatagaagtattgccactcacattccaatcccgacaagtggataggttgcatagaagagatcgaggtcgcgccaattcggaggagggacgaatggtgctactagcaggattaaacacaccacaacccgtaaccagacagccggcaaccacgctttgaagggccgtggaagatcaggctcccggtatcttactataagcagaccaactgtgatagccaatgcaaacatctgtccaggatatccctccaagtccaggataaagttatagacgtccccttgtggtggtagggcgaggaccaacatagaagggatatagtgtacaataagtccccccagtggggtcccaaatggtcgcgaagacgatagaatgttttgccatggaagaaagccttgtcgggctatctcttgattcacacgcgcctatcaatgttagcatgtattggctttctatgcaatatatccaaacgtaccaagccaaaggtcaccaccatcacattcccggcagctgaaatggcaatagcaagtggaaagaatatcttcccaacctgatccccaaataatctctcgaatagcagtgcacccactaattccccgctattcttgatctcttcgagcggaatgacaaggaagtatgaaagattcgcaagaaagtataggcccccagccgtgaccagcgcagtgggacacacggtcttgactatattcacgggatcatgaacctcactgaggacattgttcacgttgctcaagccagcgtaggaatagtagactttgaacaaagccgacgaaagcagactccagctccagttcgatccttcccacaacgaatcccaagaaaacggaccaactctctctacaggcgataagttatcagtatctccatgcaagccgagaaaaaccacccagactcccgtcaaggacatcgcgccgatgaggaagatcttcacccagccaaggacattctggacaaagatgccagttttcaagaaacaaccatggacaatagtaatggcagtcaagaggccaacagcgagtgccttgtgctggatttcggtaggctcaatactcagcgcgaagaacgcgtattttgaaaagataatgcagttgctcgccgtgaaccctaggagcactacctgagctgttataaggcttgacgcgagaaagcgcggtcggggataggtatactcgaggtacacctgcacggaaatgagattagtttagccgacttgtttctgctaatcctgctgcaatgtcttttaccttttgtcctcccgagcgaggtagcatgcatccgaattccataaatacggctaggccgcaagctgataatatcgtcccaaccagccatactagcagggtcaatccaatacttccagcggatctgacgatcgagcctggtgttgcgaagataccgctcccaatcacctgcgaaacgactaggatgtatgcgcttgaccagttgatgctctttctgtagtgcgtccctggtagggtatcgggatatagtggggggaaatcatcggttaaaaggtcgagtggttcttgttgagggctgggagatataatgttggattgacttgatgggtttaaaagaggctgtctctcccggatatccatggtgagctgttgcagatggagtacgttgtatagtttgaacaactatttgattatgctgattacacggaggaaatcattctagaccatgaattaattcagcccagaggagagtcgaggagataagatgttttgggtgcttggaaatcatcggattagctggcacgtcattcaggccgactgttgtgtgtatcggattcttgcaggtggtttacgccataggaatgtgatcgcacaactcacattaataattaagaggaggtatgtaactggcctatcatactttggctttgaaatcaatgttaaactatgaccgaatactccagtactttattcgaggtggagataatgacccgtactgggataggactatatatagcagggttattcagagataaccacaaaagatcaaagaggaatattcagcccagtataaagtgtagtcatttaaattccaaacccgaatatatccctactcatagagtccaattatccaaccatcagagtacatatcggctgtttctgaattagtatcagcagaccaacaaacgtgtagatgagaactcacaaagtcaaattctccctgtcagtcaaatccaactgactattatccactacgcgagcgactttaccgccatccgaatcaaccgtctcgacaaccccattgctagcgacctgattaaactccgcgagcttgtcgcgacgcttgttctctcggcttaggtagatccggagcgcgataataattatcgaaggaagaatcgcagcaacctggagagctatcagtcaaatattccgcacatagctttgtccaaacacgacttaccacaagcaaaataatccaagttggtctgtaccgaggcttgaatggttgttagtatgacagtccaagccagctcgaatgaagaactcaccttccattccggccggaataattgcggagagatgatatttcccagtccgtatccaatatgataaagcgcaatgacggtagttttcttcgtatgtcccgcggacgcattggcagcccagatcatcacaacagcatatgggatgccggttgtagatctaatccagattccgacgataagaccccatcgattggaccagggcaaggctgtcggaccaattagtagtggaccacattttgaaaagaagagacctactaacctagcagaaggatacttgaaagagcacctggaatgtatgcaatgagcgatatccatgctcggcaattctgcaagtttcagtccacgttcgcattagatgaccgagtctggcttaccttggtgtgatacaaagtgattgcagctgatatgagagaaaagaacgacaccacacccgtgacggttcctaatagtgttgtttgaagaacggtgaaaccaaatgacttgatgattagtgaatattgattcgtgactccatttgccatttcctgggaccaggcgtgtaggaagaagagccaggttttggggtcttgaattgcttcaataaacctagagctttagttagatattgaatatcaagatttcttaggtatggggtctgactgatatcttttgaaaaccttttgctcgattccggagtggttctctttgatccgtagaatagccttcgcacgttcctcgtgtgttaagaaattggcatggataggactgtcaggaaagaagaaatatacaaagacaccaaaaatgacagtgagaatacccgtaatcactagaatagaggttagcaatctgacggatatactcggggaacaaccatacccatgaaccatttccacggagaaaagctgcccgtatcaatccaaagaacaccataagataacaagcctgacgtgataggacttgcattaccaattgaccacataaccggcatcatgacggcctgctcgccataagtaaagaacatggacattgaaagcaggaatgctggaacgatgcatgcttctgctaccccaaggaaaaagcgaacaacaaaaagagatgcaaagctgttgcaagggatatgcaagagagtgattccacccctatagagccagtcagtgaccgatataccattgtttgaggacaagagaagaacttaccatattatcaaattgccagccagccacttcccaacaggaaaccgctgcaaggcccaattctgcggccattcagccaaaagatacccaaaatagaaaattgaagagagccagttatattgattcgagtttagatgcgcatcttgcatgatccctaggatcgcagaacttccaagctgctagcatgttattactggattctcctattcggggatcaaattaacataccgtttgcttatcgacatacatcaagtgatatccaatgcaaagaaagggtaaaacccgccataagcatttgttgcgaatctgtattgcttcttcgggagtcgggtctgtgacttggattttcgagaatagcttaaaactctcatcggcaaattgatcagggagctttggcgtgttattgaaatcattgtcactttcttcatggacttgtgtttctgccacgaagccaggtttatggtcttctactgccatcgtgtgaggtataaacaacgaagaatatgaacccgcgtaaaaggctcaattaaatgcataatggcagccctgctcatgtacttatgatagtaattagcctatagataaaattgcgcaatgttcctaagctccgtcgtcttcacactaatgagagattcgcaccagataagaggaaggagactgcgggctcaccacagtcttctcctaatctggaaggtcgtgcactatatcttacttggcagaagagtgcttgattaatcaaaacgcgatgttcatctatacaaacgcgagtttgactccaaagcacgtctaaagtcgccattgcggggttgcgtcagcgctgcattgttggcgtgcttaaaagctccgaagtcatggccgcgatagaccggaactataaaatttttttaccagaagtaactttttatcgaactgatccctgccgaatcgacgaatatccaattatatcaatatgacagaaaaaaaggaacctattcgcgtcttgattgccggcgcaggcatcgcaggtctggccacggctatatcgctaacacgcgtatcaaccgttccgaacttggatatccagctatatgaacaggctccagagctcttggaaataggagctagtatcgcactcagtccaaatgtaggtatctcgcgcattctcttgaaatgattaaagcacctaaccgtgatgaaatatcagggcatgcgcacactggagaaactcggcgtacacaatgccctaacagacgaagttgggttcagaggcccgagtggaatcccacaaatattccggtgtggatctatcacatagactcgagttgtactactcagcatgctgattgataaatagccactggaaaacgaaccaagtcgtgtctacagacactcacactaacgtccccgatccccgtcaccatactacccgcttccaccgcggccatgtgcactctgctctgctcgagcatgtccccaaagagtcaatccacttgggaaagaaaattgcgcgcgcagaagccaatcaggatggagtttcgttgtatttcgaggacgggagtagtgcccacggagatatcctcattggggccgatgggattcgatcggtttgtgatatagcttggttagcattgtgctttgctaactcctgttcagagtgtcagacaatcattcatcccagattataaactacggttcagtgggaaggtattcatgagggcgacgttcgatgcctcgttggtagagggcaaggtccctgatttgcctgctgattcgatgcattgggtatgttatcgctacattagggagctttaaaatcgtcgctaacaaactgtcagtggggtcctaaagacaacttctttgcgtctcgtcttggtaagtgaaaaagaaccagcatttcacggctgcatagatctgacaaaaccaggcaaggaccagtacaccaccgtcggtgcatacgatgacccgcgttcggtagaagaggtggagaaaagcattgcgtgggatcaacttggcaatgtggagttcctaagagagcgatacaaggtatgttctcaattgacctatctgagcttcagctgactcacaccctttaggaatggaaccccacggtcaaagctctgaccgagcttacaccatctacaaatctctatcccaatttcgcaggagatgctctcccgtcttgggtctttgggtcgcgagtgactctagtcggagacgcagcccatgctcatggcggttccttcgcagccggaggctcgctggcgttagatgactccctcgcccttggccttgcattcaaggaagtgttctcttcaagaaaggccacgttatcagctggaaatatcaacaaggcattgcggctgtacactcaaaccaggcagccgcatacagctcggttgctgggcattgtgcatagccagatcgacaagaaaagtactatttttgcgacacccgaagaagaggatgctgcgcttgttgctcggatgactagcaggccaaatacggagtggctctcggaacacgatgttgaagctgcattcaacgctgtcgttgagcaggaacgggcgcagcgacaggtacgccttgctagaccagaaaggaagacaggtggagagatccaactccaaggaagcaagttatagaatagagtcgttgattgattcctgatttatttagcacatagaggattgtgtttatgctatgtggttactttttcttgacattttaactggtgagacacccgaaagacatctgttcatcggaatctatgtacctatccgattagcttttgcgacattcggccgaaaagcaagactagggtctggtgtgctatacaacggatagttaggacagatgatctgaattcccgagcaaggcttgtgggccaggatgtgccacgaatatctgttccactatgctttcaccatgtctcgggaatcgatagggtatacgctccataaataatcaattgaggagcctgatgactgaagcaaacgtgtctagtcccagcctcccaggcttactattgtaaaacattgggttggttatccaaggcttgggagaaaaacacaagtggcaatgcgatagtggatggccctagaggcgtaggcagaatgataaaagtgcaagccaatggggcttaggcaaggctagtgataaggaataaccttgtataggagtatacgatgtgaacatcgtacttttccttgttcggttaagtcggatgttccgtcaaaaggggcggagcttctgttgaggtcacggggtgtggctggtgcaggtcaaaggatcaactgaattctgcgtggcgtgtgtggcgcacgcatgagattatggctcggaaggacggaaggctatagtttattctagtagaatccagtcgaatgaagcaaaatatagtagatcgtcacagctctttgatctgaaggagggctggaaccgggaacaggtggatcgccaggaacataaagacgtggtatgtatgccagaggcagtgcaaggacagctgcgcctcacgaaaaaacataccatcttgtattaaatagagacagatccagagtcctttgtctttccagttcaaacaattctgaataatctcgccatccgacagtccattggacattctagaacgtttctctaaaccagttcttatccggtggcaacctcctttatcttctccttatccaacatcctccaacatacccaaaacatacaacctacacacaaaatggctacttcagtttcaatgactaccccatcccactcctcgcggccatccctatccctagatattgccaacatgcccccactctcccagccaacaccaccctccaacaccctcctaatcaccggtctgcacgatctacttgtcttccaacccccagcactggaggaaatccgcaaacaaatcaccgaagtggcacctctgaattccttctccccactcccgtccatgcgccgcatcgtgtgctccttccacaacgaaatcgacgccacggcagtgcgtaaactcctggacggcaaacgcctcctagaccgcaatgtgtacccgcggatctacttcggcgagccgacagcactcctagacggcggccgaccgaaactcctcgaagccccgcaagtctccaagatgttcttcatctcgccaccgcccagcccgccgcacggatgggtcgtgcgcaccgagggcccgcccaacaaggaagtccacgcgacggatctagcacacgcactggcgatgctgaagacagaccatgaccatgcgcagcccgagccggctgcagtcgaccccgcaacgccggtctctatctcctcggacaagcgcacgtccagctggccgcttgctggccatcagcgtagcaggagcagcaccatcatctaccaccccgaggaccatggtgacagtccccatcttccggcggttatggttgaggatatgacgctgggtgctgaggatgaggatgtggatatggatgcgatgagccccattgagatgtcggttaaccagatgccgcctaagacttctcgtccgccgcttgagttgatggagtagtgttttccggggatgctgttcttttgtgttctacattctgcatttttagcgaggcatggttgtttattgtgtatagtcgcatctgtggcatgccaggcgttgggaaaggatgggcatttcagcagcttttccgggatttgcttgacgttattctttattgctttacgaggaccattcttaataagattcttaaataaacattgcatattcatatcttatctttggtagttgtatctgataatctatactaatgttattgttggctcagtttcttggtttgatagtgagctccgacatcgtcaatttgcagtcaaagagtgaccacacactgctccatagatctctgcctagtcctatacaggtgtagaagctaggacaataaagccttgagggcttgttccgaccttgagccggtttgaagtcctgtatctaccaagaaacaagagcatgtagattttcgtgattggttagtagtctagggcattgactgaggtttattgttgattcccgcatgatgccataacttataggaagatatttcatagtttagcaagttccatgatattcagtattttcaggttcactgaaccatcgagtagatatttgagatacagagaccagtcattctctatcatcagaagactgtccccacagcaaaagatacaaagaatggaaaactccagagtgcgcccccattcaccaggaaatcaaaactccattgcgcatgctcaggctttatttttatttgctgggttatgcacgttcagaacccatagctgctctgtccgtaaggcgtagcaccatacggtgtctgtgcactagcgccccaagcactagccgcaccgtttccgtaggcagtcatgtttccgtcaatgccctcaggtggctcgtaagcatcggggtcattggcacccatcatctcagcatcgtcagcacctccgccatgtccatcctcaccttcacccaagagcacggagacggtggttgcgagcttgcgctggagcgccacaataccctgctggataatcatatctggctcaaggttgccaatgctctccacgtcgaaatagaagcaattaggctcagcatcgtagtcaaagggctggtcggggttggcagcgggttcccaggcagcgttttcagagataggcctatcaagagtcggtatgttagcagatagatcgaagaaaactcgtgaataccagctcaacgcctagatacgtaccattccttcaccggatcctgctcataccagtagtccacatggcgcaggttgttgttggggtcatattcaaagccgacagcagcagtgggcgcccacttcgcatgctccttagcggttcccttctttgctagacaagtcatcttaatctcctgccctttgcgcagcttgcagatcaaggaacccttgttctcggggtcagtggttacaggatcgccgatcttgtcgttgatccgctcgccgacgacaactaaatcccgcgcgtagacagacatgatgccactgctgcagcgcgcatgcagagatagtgtcacgctgcagcgcacacagtggtcttcgcagtcgcagtctcgcgtgtagtcgagatcttggtcgcagttgtacgagttcaaggggatcatgccgaggcggtgggcgaggaactcatcagggaggaccgaggtattgctttcgatttcgatgatgtcgagtgccaaagtgggcacttcggcgaggataactcgtcggagggagttggcgaatgagaggtcgactgcggtcagtctgaaatcgacgcggtaaggttccgcctgtggaatttgtgagtcttatgtcctgctgctctgtggatgtctcagcttacctcgcggactgttacttggggccctgtgggctcgagatccatttcgtaatccatgttggtatgtatgcggcagcgctgctcgctgccacccttgtctggagctgaagatgtttatctgcggggcgtaaaagaaagacggtaggttgaagagtgcggagtgcagtggcgaatgacagggtaatgagaattgttgtggtagatgaattgggcgcgaagttggcttgagggcacgcgggtttgctccctcggagacagctttttgcgctttgcctaatcgggtcacagcctctgaaagtgccaatatcgagtcattcttttttacatttacagccataataaaatgctttcacttattttctatttattctacggttctcttcttcgtattcagattagagagtggaggaagtatttcagattcgattcagttgctgggtataaacactgaatccatccaaaagactggtatctagaactaaaagaagtgtgcgctcgattcaaatctggcaattgaagccgtgcaattgattcaggataaagtaatccgatatcacagttgataagctaaggtatcctccagtatcaatgcaagaacgtcccaaagccttcaagtctgcttgcgaaagacgtctatcagaaggagacaaagcaaagcaacacaggctcagatgttcattcgcaaatgaaacagcagacgggtagcggcagcccgtcgaagatgcaaaaaaaggtaaaggtagacaaagccaatagtagaagcgacgaagccaccgttttttggagttcatgtcgagtcattatcagggagcagctctctcgggatagcagtgcacatagaggtagaaaaaaagagggagggggggtgtttgatctgcaagagaaccgaatgtgcacgcgatcgaggctaccgctttaaagagctgcgatgcaaggcttcaagcaactcgggccgatttgcaagggcagtggcagcctgtgtatacgaaacccactgccgtttccgcttgtgcatctcgggccattcggtttcctcctgctggacggtgacttcgaagaactgatatgaggctttgggcgcgtgcgccgtgagaaggccggagggtctcatgtccggaatgagtcccagatctctggtcacgacacagatgacacccgcttcctcccaggcctcacggcatgcagcctgctcggcagttttctcatcgagctcccaaccgcccttggggagcacccagcctccgggtcctgcggattgaatcatgaggactttggtcttgtcggcggaaatagggacaacgccggctaccagtcgctcgccttttgagccgtagcctatgccaagccgttagagtcaggaaacacggggacagtgtagacgtaaggggtacgggtgcccccccacgtgcgcagccgcaaagcgacaccagcgataactcacgttggtttttccgcccaacgcgggcttccatagaccgtatttgagccattgtaatagacaatcgaatatctttggaattactccaggatttggtgaggggtggaaagtcggggaaaggaagaaagggagaaaaagagtggaaaggccaaggatatcgaaaagatcaaggaaaacccgatggatgatgctctcggaagctccctcggagcctgtcaggtctctgaggtgagggaggaagctccaggtgtctagggtggtgtcaagggacgggagtacagcgcgagggcggtcgggggaaatttttttttttctctttctggatattgcggaggtaggcaatggagatcaggtcttcccgttcatgcctgacgggggattggaatggtaagtggaaataggcatggttttcaaaagaagaactgagaaatgggaggttattgaggaatggagaaacgaagagaagtgggaatggaggggcacggcggcgcccgggagaagagtcgaggtacgtttcgattttttcctttgttttttgtgtcttttttttatttttttgtgctcttgtttgactatctcaacttgtctttgttatattgtgcactatagtgactctagccacaacagagagcgcgtaacctgttcaatggccttgactttactctgtttcactctatatatggtcatgtgacactccagatggaagaagtaactgggatgtttctatatttgctagaatctgctgtattttgctatatttgccacaatccgctctgacctactgtaatgtacgcttactattccaatcatccaatctcataaccctgtgtgcgtcgggtaatgagcctcttacaacgggatttggtaccgagatgggagaatttcgggagtttcgaccagaaactataagatcggccgtgtggctggagcgatgagatgcatagacagacctaactaggtcgacccaactagacctaaaaaaactacataagcacgcataaacgtagtcaggtcccccttgccgtatagtccgcatttacaacattaacccccgccggcttctccgacttcatctcttccgatactacaactcacgtccactcgccagtgcacgccaacggacatccaatctaaacatgcaacgggttgacgccgaacgcgcgcgagaactgtcgctattccgcccactaggtacgtcccactctcctgcagggaaccactgagataggcctctgttaccccgtggtagttccactggcccagagcgctaccgctgaggggaatttggcggggatggcaacgccaatgcatgcagctctttgatcgtccatttcgatgcagaaactaatgtgatgtgctctcaggttaccaaaagaactcgtgtggctactgcaagtccaaagatggaagttggttgcccctgactgctttgttggcccatttttcttctttcaggtctagaatggctatgctgactagtaaaaggtgcatcgtactacgccagttccacgtccgtactcccggaacattatcaagagctaatcaatggtggctggcgacggtatgaaccccggttcaatttccctgtagcccatcagaccatactgacatatttagatcgggaaacctctactataaacaaaacctgcttcggtcttgttgtcctcactacaccctgagattagaggcatctgcttatcagccccgccgggatcagcgcaaggccattaacaaatggaacaaattcattctaggtcccgagtatatgcgaaaggcatcccggctttgtccgcaaacccgcgagtaagcaatcctatattaccaatcttgctatcagatgactgctaaccaacgcatagagagaaaaagcaccgcaagtgccactttgaccttctgcccgctgtccaccagagcgagtacgaccacgtcaaacggccaattgaccctgctaccaagcttcccattgaaccagcgcaccgctttgaagtcaccattgaaggtgactctgtgtctcaggcgaagtttgagctgttcctcaagtatcaaacagctatccataaagaggatgtctcccactggaaacccaaggactttcaacgcttcttatgcacaggtatcaagcgaactccgaatcccctaaccgccaccaatgcttccgagaagaaactcggttcatggcatcaatgctatcgtcttgatggcgagctcattgctgttgcagtattggacttggtccccagcggcgtgagctccgtctatgtcttgtaagataatggctgactacacccgaagacacctaaatgtgataagctgatgttcggttccacacagctacgatcccgcctatgagcaatgggaaatcggcaagctgagcgctatgcgtgaaattgccttctcgatcgagaatcagtatatgtactactacatgggtaggtcgcagtcgtggaactggtccttattcgtgcatctctgacaatcgacatatagggtactacattcataactgccagaagatgcgttacaaggccaatttccgcccccagtacatccttggtaggttcgactcgtgtctagtcttggtacatacttttgtactacgtgaaaatcatgcacaacattaacccttttctatttctcagaccctgaatcctccgactgggacccgcttgatggcgaattgatggagaagcttaattcccgttcctatgtctctttgtctcgagaccgaacatcctcgcctgcgcctctggtcccggaaagtgatgccgatctagaggaggtttccctcttcgatctcggtatgcctggtgttcttactatcccccaagtggaagcactggacctggatcattggctgctgttctttgacaacaattttgttcacatgaaggtatgcatgtattctatgattttcggtcctagggatgtctttactaaatcaaaataggatctggtcaaatgggaaacgatgtcaatcacttcgccaatgtccatcaagggaatcgtggccgagttggccgcagtcctgggctcgaaggttgtccgaaacagcgcagtagacttgctcggttgatcaaagacggcgatttgagcctaggtttactatcaccgagaccgactggggttccaaacacccgcaacgaatatggaacagatatagagtaattgtgtcgaataattgattcacatgcaattcagtcaaatccgccaaatcgaggcagtctctgattatcttaattctagatccaaatgacaattcttagcaagcaacctggtaagtctataaagttccttgaatcaatgaaatgctagaagctcgacttctactagtcctgaaggatatgtgacgtgtacgccccaaattcaatgtcatagatcgcgctttccttccacgcgtatctacgtgcctacctaactaggaaaccatgcccacgtgattcattgtttaactctctcaactctcctcactcttctgacttttctcaccatcctaatactcataccctttcacgcgggcctttggcacctagtcatctcgaatccctcgatcgttcttccttatctacgctggcccttaaaggggaggtgctcagccaggtttgatttcacggagcatacgatccgcatgaaagagatgagatttgggttcctagtaagaggcaccttcctggcattgaaactctctactaactctttaagtaccgatttctaattggataggatcaagacatgtccatctatcgaacagccgttgaaaccccttattaaggttgtcgcggtacgaatcgaagggagttgcatttggggaatactttcaggactcaagttggccctccctccaccaagccctcgcgtttctatgggggtttcttcttttatatgtgggccttctggtggaatggaggattggttatctgggccagcgattgatcgaccggtatttacattgaattctgtgaagtcggatatttatagaaatagtcatgttattcattattatctcggaggcaattttggtggtggatcacatcaacgaaaccacgtctttctttttccaactagaccgaataccctctggtctccttgatgcttgccgtttaaaaaaataattatgtagctgagtcgtgcccaggtggtatcaactttgtttgctgtcttagtaccatctaagactccctccctttgtctacttcccaacacgttcacgcacctgcacggtttctatcctaagtctatcatatttgatacatacagagggggtcaattgctatgtcacgcggaacggaatagaatggaatgctatgctaaactatatttatggccagaatattgtctttctcttcgttggatgctcatcctctatttatatcaataaggagacaggaattgacctattgctcctactccttggggtataagagtaagtaaggacactcgtttatcatcagcggttactaatatagtacaggatatttcaactcggcgtgagagagtgtatgtggcacctaccgaggttttcgcataccatggggcatgcactcactatgcctttcgagaagacataaatttggccgagcaatatcagcctgacaaaacgatgaagcaaatacagataatccacggtatacaattcataagtggaaggaagcattatcccgatggctcctttgcctccatctctcaacaggacgcccaccaggatggactgggcaaattccatgctcttgtgattctagaattccgatcatgttgttcatgaatcgttgtggcagatgaggccggaaatcatcatacctccgaaaattgtgacgtccactgtgacccgagcgagagaatttcagtgtttttgatatatacaacaaccttgccctcatcagacagggcttccatataggttatcgagctcaaagtgccttgggtggatggacatagaatcgcaagctttatgcaagtccaatcttctaaccatggatctcacttgcgaatgttgttggccaaatctctggaatttataatggattttcaatgcatgtacggtttcctatccatctacaagcaaaccatatccctgagacaacgttatattgctcgccagatccaatcgagcctagcctcatggctcaaggtgatataagatcacctcgaatgtctgattggatgttctcttcaaatgttctttttctgtatattcctttcttctcgatgttatagctagaaaggtgatccttagctatggaaggcagaaatgcgaggctcatcaatcactctacaacaatctaaggcaacagagaacataaaccttgtagaagacatttctatgtataaccaaaaacttatataaagttacacaaggacgatgactatgaacagtaagaaagttcattcatacacccaaaaaagaatcccataactagacagcgccatgtagtaaaatcaagccagctggcgccacatgtttctatccgtttgcctcgcaatcctgcatattcgccacgaagtccaaagaacaaaagaaaaaaataagcagtcattcaaaaaggcacagcaggtaagccaccatattcccacgaaaagcccgcagccgcggatgccccctgccagatatgccctagaacgccagagcggagagacaaaagaacccaaccaagaacaggatgctatgccaaaaggatacatgaggccaaaagaaagaaaagacaataaacaagatcaggaccctcaacccttcactcatcatcatccctcccctctaacccatcaatcatagcccgacttggcttcctcccagccccatagaccagctccataagcttcgccttctgcctttcccggacagtccgtaggtagtcatatgtcccctccaacccacggatctgcccatcaataacagcctcaacaggcccaagcatgcggcccggagaaccagaatgcccattcccgttccccccatcaacggacccaacaaagctaacagagtcattccgacggacgagcgggctaaccagcttcctgcgcagcgtctctagattgaccttcagcgtgagcagtcggccgcggtggtcaacgaggaggtgtttattggcgacagtgcggctgcggacattcgcgagcaatttcttgttcttctcgtatttacggaccgccgcggcatcgggccctagcacgcgagtccacagggaagaaagcatctcgccctccgcgcgttcctgggcgtcggattcacggacgactgtgcgctgcaggttgaggaactggcggtcgatggactcgaaaagcgcgaagagcgcggttgagtgggtgagctcgctgtttattgattcttctagcacagcgaggaactccgtgaaggtgcgggttagggttgtgcgtgtgcgctgcgcggaggttggcccaaagacggccattacgaggtggccgaggggcgtcgttgttgttgaggttgcggggacgccgttatcggagatttgagctgaccgttccagtgcgccaaggcgcgaaagcatgttgtgcatgttgtcgaagacgattgtggggagggtgcttggaggctgggcggagagggtttcgagctcgcgcttggcccagtccattactatgaggatggagtcgatgtccgagtcgacgtttgcgaagaagcgggttagctcgagagagagggactttagggagtcggagagctcgtccagttggcgcacgattataggtgcgctggtcatgtttgtgccacggacagactcgctcaagtcccagactgcgacaccggtttcttgtagtgtgccgatttgctgaacgccgttctctgagtagtatatcagtggttcgaaggagcgtgcgaagccggatagctttactaaatcggggatcgattgcgggaggcctggcaggaccagggcgcgcatgaacgcgactgagatgagaaggattaaaatagataaggtggtgttagacttggagctggtcatgcgctcgaactttgagcgtaggtagccatacatcgcggcaatgggttctcggtgctggacttctgcacgcactgcaaagcgaatgtctttattcattcacaacaatcgttagtatacccgcgcctgcaactgaaaccagatcagacagggcctacagttgctcagattctccgcgccaaagcccaccccatcgtcctcgggactgcgccgggatgcgcgccctgaattcggggccggaggcggacttggggatcttccttggagggggctatctgcgcccgccggtagaggcacattagccgcgacagagacgtcgcctggggtggcgcgatcgcccggtctactcttcgcggggccctcgagcgcatcctcatactgtggacttggctcgcgcgactgggaaggggaaacactaagtccgactgtgggcttgagctgcaagcaatccgcaatgaggttatctttgcgcagatagggctggtggcgataccatccactgccttggacatattcgggtggatggaagccagggggtgaccatcgttcctgcgtggggtcctcgatctctccatcgtctccgtctgagtcttcagaccggaatccggagtgttgggatggcagggcgaacattggggacctttggggattggtattgttttcaaagtcttcgagcgacgcgtccagggatggatggtcgtcgaagacgttgtctaactcgtctagcatcccggacggcgtatcgcgatagtcgcgcctcagaagaaaaggcactgcagttctcagcgacgaagcgcagatcaatgcctatgagtggcgatcagttgcggttgaagcacttggacttccttaggtaaacctgagtggttagtatatgcgctgggacagtgtctcctgcgctagccgttacagaagatatctgagcgatgaaccccactgcaaagacgcgataaggtatgatgcgatgcgatgcgacaaggcaggtaatgaattctagatagcgacaccggatatctccgcgataggcacattcgatagttggtgttggactaagatgcgatcaggtaacgcgctggagattaatatggaactgggatcgaaacgcctccttgagcaatgcaggaatcaggaatgagaagacgagaaagcatgcgtcccctcacttgtatccaggtcgaagaggctgggccaatcagcctaccccctgctggtcatgtgctgagactcgacggtttatacacatcagataccgggagaggcacaggggtggtacgagtccagtacttcgagtttatgttgtctaaacagtgagcaccaaggtactcgtcaagtactcttcaagtatatccgtgcctgaccgcccatgtttgcccaatcgatacgaccagggcccccagccaatcagaagtcaggcctccatgatcatccgaagaatctcaaacactagggatagacttgcataaccccgtttgcagtatggagtacgtttgttctattaacagaatatcaaaacgaagtggagcagagaagcagaggagcagaggagaagagaagatcaaatctattttgactcatggaaattgtaataaaaatacaagcccggtcccttgggaggcccgggaatcagcccatggcgccataatcccagacttctatggggagaaacagaaaaaaagccggggaataaaaaagaacatcaggtcgtttatgcggtgttatccttgagccagctatggggttgtcagtggggttcaggggagtgtggatattcgcgggtgacgtacgtgatgagatcgttgcgctccttggtcttcttgagaccaccgaaggccatcttggtaccggggatgaacttcttggggttctcgaggtaggagaactaagaggtattgttagtcgccgatcggagcggaattgaacgtggcagttggcacttaccagagagttctcgttccactcaacaccggcctgcttgttggcgtcggtgtaggcgtaaccctcggcttgaccactgtgacggccgaaaagaccgtggaggttggggccgaccttgtgggcaccgccggcctcggtggtgtggcactgggcgcaacgggtctgaaaaaaaaatatccgttaggtttcctcttcacttgtctgcgcgtgaagcaataatgaacatacctggaagagcttggcacccttggcggcgtcacctggagcgaagttgagattagcgattttgtcggcttccttcttggcttcttcgacgagagtggccttggcacgctctgcctcgcgcatgtcgatgatcgtcaaggtgcagaacacatcgaaggtagtcatgttgaatatttccaagcgtggtatttgcgaaaggtggtagcgatcgcaattgaggtaattaggttgacgagggagttgcaatgtgaggaaaggtgaggaagtgttgttcaagcaccatctcaggttaacaaagcgcgttgccaattgagatacccttcacttccttccctgaacctccatggcgcctccccgacctcctttcagctcaatggggcaaagtagatagcttaccaggggcgaaagattcttgcttcttaggagccattgtgaagtattatgaaagaataaaaagagaagttattatgacactgtactgtacagaaaaaactaagaaggggagagaagaaaatctggttatttgtacttgggccccgacgcttcctctcgtaatccgccattccgccaatcagaggggagatgattcaggcggacgggcgcaaccggaaacttcggtgtggctgttgtggctctgacatctttcactcccttgtttgtgctttctcactgagacttggaggttcaatgcttgggacagctggcggtttgtctgtggcaacaaaccgacttgtatcctctatcttctatgtcccgcccctatgatctcatacttcatcatcagttagctccgatacgcttgtgtatatgcaaagcttcagttggctcggaaacagcagctctttcaccaatttttcactctacagagcacccagacgcccatggcaatggtggcccacatctacgcatattcacccttcactccttctgctggagaactggagcaacttgcccgatccaccgcagcttcgaaatggcatgattctcattcgcccgagagctggccggtggtccggcgtgtggatcctgaggcagaaacggttcattctcgatgcattctcggccgtgaatgcaatttaacctgttgccgaggccgcggtaagcttcaataaccttgcaaggttcattaggttggtttatgtaatctgtagtagtctcagtcacgactctgtcgtacaactttcccaaacccatgcaattgtgggaaacacgggaagtaatggatactaagccacgcgaatatttcgaaggtcaagtggtctcatcaaaatttgcattccccgaaatttccattccccgaaatagtcagaatatgcggtcagaggtcagaacatctcgactcaatcggcatccgatatcccgatacagtcacgtgatataaaaccttctccaaaaattgcatctacggttccgcatctagataagtcaacaagatcatccaaccccctccacaggagcaaaagggcaagaaaaaaaataccaaaaatgccaaccccaatccccggctttctcctccctcgaggcccaccctcagcaatgaccctgcgcatcctccaacgccaaaacacccgacgcagcttcacctcgaccggcgccgcgttaaagaaagtcagcaagagcaacaccaatgccaattctaattccaaagctagcggcacttctaagccccgcgttctcgcaaagcccgacagattccgcccgccctcgcacccccagcgcctgacgactccatctccgaagaacgcacccccaggccaaccattcgagtatggcccgcggataacggagaaagagcgcatacagcagagcaagacgcagtacccgggcatgttcccgccggagggaacagtgatgtttaagttcctaacgagcaagtggatccacatttggattgcaatggtgagtttccgacaccaagctccgggtctaccaaaagcaaagcttccaggagaactcggtagatcaatcaactaatcaactacacagagcgtcctgatctcctgcgccgggttcaccttcacaactaatttcaaagcaacctcgccgttcgcgcacctgctaccatcctggtcgagtctgctgacgtcgcctttcagcacgatctcgcaggcttttgctgtgtggcgcatgcatgtgcagcacaactcgatgcgcgtgcgggagcagcgacaccgtcgcgttgaggatgcggagaagaggaaggagtatcgtgttgcgcatgggcttgagaaggcggagcctgagaagaaggatgagggtgttgaggtggattcgcagtcgcctgttgctgctggtgctgctggtgaaggtgcggaggctgcgaaggagtttgttgattgggaggggaataagaggcccgttaagaagtggttggggatttggtgattcttatttcctccacgccttggggtgggctatttcagtcatatctacgggtagtatagctatctaggtatggcatatgctgtgtagggtttggctgtgggtatgtatcgatgcagtcatacatgagggagcttcagacacccttccagcagcgacgttggtgtagatggacgttcaatccattttgtacattagtggactttcagtctacgataggaaggccatctcaacttcaatcgatctaacgataaagagaaacgatttaaccaaaaaacaacgcttttctccaaactccagaagtagcgacctatcaaatcaggtatcaaaagtcgcaaccttaaagtaatgctgtactttagtactcatacatgaaatggttcaaaataagacaatcattgcaccacaaccccctcaagtccctcaagaacctcctccccaacaccgcccttaccgaggacattcttaatcatacgtgcaataacattgcgcttgacaccaccccttcgcggacgccagacaccctcaacctcctcctgaccgccagactcctcgccaggccccgcagtagcaccaagcatattcacattctcggaattgggaatacccggctgagtgaggcgggaggggggatcgatcgagcggatcgatagcagtttcagagtctcggagtcactgctgcgcgtaacagagatagccaggacggcgtctgcaacggcgatttcttcgcggttaggatcgaagatgacgttttcaccgacagaaataactagcagcgttacaggtgggcggacagggtatgatggtgcggcggagagaggagattttgaagtattggagcgcgggtagagatactccgcggcggcccagtcgtcgtcgaagaaaggatcttcttcacccgtggacttgagtttcggtagcttagtgctgaggagggcgaggtgggttgtgagcgataggagggggagagggtatgcgagaggttgagagagtagcagaacctagggtatgacatgtcagcagtgatcaagtcatacttttagaaccccagaataaccataaaccgagagacagaaagcgattgtcaaaacttacatcaatatacaagcgccaatgccaccgcttgttaataacaagcctccccttcaacccaccggccatctccttcgaatccccgctcccaccagaaacagaaccaactagactctctcgcatcatctcactcaaaaacacaggcagggcatcatcgtctctaaacccggggatctcaatcgacatctgcacccactctccctgtcccgagacagcggcggagccctcctcgccctcgcggttcagtgcgtcgccatgctgcgccagactgcgcgagtcgagcgtgtcggctgcaataacggtcttctcgacttctgctttcacgccgacgatcgcttgcgtgccgtctgcgaatccgatgcgcgcgctaccgttcgcgccaggcaggatggtcgtctcggcagacagaggacggaattgtgtgggtgagcgaccgtctggtcggattgggttcttggggaggctgagggaggtgtaaaggtaggagagttcggcgggtgagaggtggggcacctgagaggcggaggaggcttgtctttgatttgacattttggcggttgtagtgttggtgttgcaggcgaagcgaaatagactgctgtatcttggaggatagagctggagttcggttgcgcgaggttaagctcgtagctgttggcgggcggttgattttgtggtgatcggcctgcgatttatgaaaagtgcttgccgggcgtgctggatgtgctaaggtgttggtaacccggattccaagctatggccagtatagtttcagctggcgaggttgaacgggggagcaattgaggaagaaaaaaaaaaactaggtagagtcgagcaagcagtctcaatcaggaaatcttgatgggcaacggatgatcgttgttccgttgatattgatccatgtaactagatgctgtgatttttctacattgactactccgaatttcgtgacagaatgaccatcttctactgtgtaatctaatgtgcatgaattgagcccagtattttagcccaaaaatcccaccttcccacgctgttcatcattttcatcgccactcctcatgccaactgattgataggaattctaataagcgttacagaaaacagcaggtataatgtctcaaaataaagtctcgagtatgtagattcaatgcgtatgtagtaagatatgtatgggcatggcacaacggccaaagggggaggtatattacaaatatagaacggactggacccaagccagcacgccgtgggaaaataaaatgatacaagaattgaagcaggagggagagctatgacaggaatatgtaaatggaggggataaataagtgatagaaaatgatggacaagaagtaaagatggggatggctgtagccagaaaatatacaagcggggagaagagggggaaattatatggacaaaggagagagagcgcaatattcatcgagaatgatttgcaaatgtgcagatccgatatacatatcggatgaagagagagggtgaggaatacctaataaggtaggaggaaatgcggtatatgatgcgacttgcgcatgtggtatcaaacgtcaaggaaagaacccacgcccctgctaaatgatgaaacgaaaggactccatgaaaaggaaaaaatcaaacggcccaaatccatctataaaagggctgcaggggtatgaatgtagagaaatgagaaacttgcccaatgcccatatgtgaaaaaaaaaagataaaacaccctccgaaatggccagaccttgcaaaggaaatataaaacccaaaatgcgccttgagctatgtagcttgctcagtgtttgttctgttttgtaattttgccaaatttttgtgctcttcgcaactgaaaaggctgtgctgttgttcaaatatagttggatccaggagcgaagtagtcggatttattgttgtgatactcggcctcctcgtaagggggagtgggccagtggcggcttgcggccatgggatcaatcttgtggatgttcaacttgctaggtgtcgactgttgaccaaatgcagcagtttccttggccgtgggtgacggtgtaggataagggttctgctgtgcacgcgagttgtctggttgccggcgagcagcactgtgcgagtcggcagccattgactgagtctgggccaggcgtctagccgccttgctggcggagtgcaacacctcatcaagcagctcatcttcctcttcaggagtctcgtaccgatgaaccgggtgagtggacatctgcatggcacggcgagtcctgctagagataggagcagggttgttgctggtgacgtgaggcattgactggcgcttggtttggccgtcggcagaattgttcaagtgcactgggacgttgctcagtgtggacgagtccaatgagtacttgacacactgaagagccttgtccagctcgttcaagtcggagccttgctttggatcactagtaggcccatccagagccactgatgaacggttcgaccaagggatgcaacctgcgttagcctcgacgtcatcattaggcgctgattggtttcgtccagacaatctgcgggcgcgtttgcgcagatgcgagaagaaactctcctttgtggttggtgtgctagtcccggaaccattgagcctcctttcggcctctagacgattctggtcgtagtgattcccatgggagttgagggacaattgacggccgatctttgagctagctgatgtactggaggacttggaagactgactgtgcgccaaagtggcgttcgcctgagctgtaacggagttggagagaggggagacagggcggatagaaggaaggattggcatcggtgcaccgtttgcccaggtagctcgcttgatgttcggcgggcgcgccttgacaggctggatctcaggtacggtgacctgagtaacagccgatggccgggcagggctttcttctgcagaaggtacagggctgtctgaccgaacgaccaatgatctccggaaccacgaaggcttagaagacaatgtaggagagtcacctggggtaagatttggtgacctgaagctcttctcggactgcttgcggcccagtagtctcgatgaggtggaggacttcggccgcaccggatcaaccgcatcggcgaagtactcgtggttaagcgcttgggtagacgttgggcggttcttaggatcccacatgagacaccacgtgacgaactcgctaaatgccgcaggccacattgggggctgaagcacggattccatcgggtgtggtgccatcttggggaatgtgaaaccgagcttgtgagccaggcgtgatccttcacgccactcaccaccgccaatcttagcgcccgacttgctgtaccagtttcccgggctacccatgatctcacacacacgccaaacttgatcgacctcgttacctcccgggaatagaggctttaacgtagcaatctcgactgccatggcgcccattgcccacatatcgactggtgccgaatactctcctgctcgtagaagcacctcaggtgcgcggtaccagcgtgtggagacgtatgtggtgtatggttgtttggagtgagtctcacgagcaagaccaaagtcggcgatcttcaccgtgtagacaggaggggtggagggaggggttacgaggttagagtagcggctgaaagcggaatcattgggggcggaggttgagacgagaatgttctcgggcttgatatcgcggtggaagaagtggtgtgcgtggatgtggtccagaccggacaagatctggtaaaggatgctcttgacgtgcttgccttcaaagtatttatggtcacgagccttcatcaactgatataagttgccatccatgtattccatgcagatgtgaagcttgtgagagtgggggtcgaggaagatgtcgagggcagggacgaggtgggggtgaatgggtaatgttcggaggaagatgacctctcgcaggtctagacatggacccaaggagtcaaatgtcttcttcattgttttgattgcgacctaaccaatgagtcagtgaagcccaatacaccaccaatcttgctattccataccatagtgcctctgcgagcgatatgggccccggcggtccgtacgcgcgcgactgccacgctaccgaagcttccatcaccaatctccttgatgacttcgaagcggtcctcgaggcttgccatggaggtatgtgacccccgggtgggcatatcgtatgtgacggtcatgttgatgttgtctcttcaggtctgccagcagatcgggagaagaggaatgcggaggaggggttctagaggggtgttcaggtcagcttcccgacatgcttgcaaggatccggcgttcttacaattatgtagaggggaaagtttcgtcgtatccccgagtgaatgtgtatgtatgtatatggatatcaattgcagcaaatgatcatgttctgagaatcagttcgagccggacggttgggtttccattgacggaaaagtaaggagtgacaaggtaattggagggggagtgacggtggtcatgtagtgggcgatctggaaggactgaggaccgggcacgatgcaataaaaaggaaaatccagaataggaggagacccgttcctggtggaaactggagggatcgaaggaccgagggtgagcccctgacgcggtgacagctcgagctcctagacggggccgtggagacggtaaattaacgactctaggtcgttgcagatcagtccaccgtggcgaaaacgggatttgaatacggaatctcttggactggagtataagatgagagcgtagagactagaacatccgactatccgaggaatgaaaataaagagatgaagaagtaggagaataaaagaggcattgtacacatccaggcgcatatagagggaataatcaatatcctcaatacggaattacgaataccgcagtaccgaaagtataaaagaaaaagaaaaaatcgatgaattaccaaaataaaccaaacagaaaaatcagaaaaatcgggaaattcccaagaaaaaacccaggaaaacagctaaaaccccaaataaccggttgatcccgtctcaaccaatgggacgctctttgtggaaccgggtaccttatttcaattttaccgtacgcaagctcaaacatgaacatggacactttgggaaaaagaaaagaaagagatgagaagtatcaattaatgattatattcaattatcgttgtcatatttacatacgttgtagtcgaggtccatgttgtgttgtatacaaactctatatgcctataacatctacgttgttcgatttatcatctgaccgctgtgaacgcacggcgcctaataattgaggaggttgggcataaataattgtgtgcagcctgtaaccgttgcccacgctctagatggtctgcactgtttgggatatgtcagcagttgggccgcgttggtaatttatttgactcgaacattagaattggccgccttgaaatatcacaaggctaaatactctaatatctccagatacaaagacatctgatcttgactttgatacaaaagtactatatacacactgatcacctcggttaccccgtctttgtacaagtcatttctagcggagatcttaggctctcggttgatgtaccagatgtacgatgtagatgcacgatgtaagatgtacaggcacaactcgcagattgggagagaaaagcaaggagaatctcttctctcctcgtctcatgttccgttatgtcatgtcctaccttcggacttatactctctgctagtcgcattctcgcacggatagtcgaacaccggtcttgttattcgccttcttacagatcatccctgtcttaatgcctcacctacaagagtacggagtaattcgtgctgacttctttgacgttgattgacggacatccaaccacctgatgtccgatctcctgatgtatcggaacactggagagagatatatggctatctcttttccgactgatccttcgacgggtagggccaatcacatactggggtaagatgctgccatgtggaagataattagtaaattaggttcgcgggtggacggaaaggttcgcggcatagaaaagcaggtcgacttaagccgcgatgagctaagagtcgcatatgatgggttcttttttctctttgtccaaaggtacacggtctgggccctggatgcctgggggatcattgacgggtttctccaagccgtctccgattgggacgtaggatttgcttgttgattcgggttctttgttgaaatcccgtctcgaagactcggatggtagtgtctctgttgccatggatgccggatccgtgttgacgtattacaaaattttagggtctaggacatcgtacctgtatatgtatggtctgaaaaaactccaatcaagttgtgacatgaaaatcagagaccaagcccattatagccactttgccggatgtctctaaccgcgtcactccggcttctccactgacttcaaagctaagggatgtttgtggtcacgataacaccgactttttgactctctcccacagtggagtacagagtacagagtatggagtgaacagatgtaattacctgcagaaagcgggatggaatgcacctgctgaaccctggggcgaccgttgtggccaaggatcccaattttatttggactcaggcggagttgaattggaagagcacttgacctctatttcaacgcatcaattggggtccactgtgtcaatgttcggtgtttgccccctaatccgatcgctgcatgggatttcaggaacaaaccttgggaagtacataaagtacacaaggaacacatctccaagggccgtaccgaaacgaaaccaaggttcgaagagagtgggccacttcacttttcgctttttcatattttttttctcttgaccgcacaatttgattactaggacaacaagctgcgacgtggagtacacaccgtgtacaatatacgatatgaattgtacacggaataccgacattcacagcacatgttccactctctcccactttctcccaccttcgagtctatgattcgctcagtggcgctttcaactccacgcgcaccaaccataaaccaatcactacggaccaaagatcagtagtccgatggagtatatacgccaacaatgccattggtcccagcagcaaagacagcccacttgatccatctatcgtacctatgacgacgccttcttatccctcacaattgcctagtcacgcactgttgattcggggaactgcggaatgctccaccgtgggccttcatctacggagtaggccagtcccaactacccgcggagaccgcgatagggggaaggatcagtgtcgccacctgggaaagcaaactagcatttgcttcccaatctgccgggaggcgccgtggtgttcttttggccttcgagaaggcagttcctgggaccgatatccggatttattgcgcaacggtctccgaatggttatcttgcctcaaaatggggtgattattacttagacctgggacttttaatgcggaagcttgtcgggagcaaatccgcagccaatctctggcctcgttgcccccctaacagccaacccccccttatctagggactaggtaaacaaactggccaacgaacacacgatcaaacggatatgcgtcccgaacttcccagggaactgcatagcgaccgttgggaagttaccaatttcgaggattagcacactaccgtcgacactaaacctcctcggcccacttcaaacgccgaaagtctgtgttggatttccagaatccgtggaagccgcgggagggacacaccccttgatcgctggaactgtcagatcggagtccagtagattatccgtcccagctgcacacgagggcactaaattagcttgaattggccctcggtgctgcgtagctgagttgttttcattaaagtggacccactgtcactccagtaaccttagatttatatgaagcttttgcgcattgggaaggtgtggacaacatacatgatacagcatacaccgacagacagcgcggagactttcacccagccaactcgcactagccctcaatggtacctatcgtctccgtgcacagtggcagtgccacttactgcatgtcattcattcattttcttcgcattcaaatctgattctcggtatatttagatcgcccagctaagccgtgatgtcttgcgccgcagtaatctatctaattgcgaagtgatagatgcccctcctcagttccttaccatgtcgtgctgcccaaaatgggtctttatgtgtgtcatacctgactagcttatttcatttctctggggactaatgtgcgtggtccggctggctttgaaactactccgtagcccctatattaagttgtatgtaaaggcaatcaattatgctcctttgggggccttgctccgcttcttctatggttttctagaaatcaaatagtctgctctcagctgcacgtcggtgccttaagtgagctgagaatgctgtttatagttagtactccattttgaggcgtcgtaagaggtttcttattgctctgctaagttaataatgtctataccccgtaagatggccaattatgccatatgtttgtttttaaaaatcaataccacaatctttgaagagcaaatctcttatgcggccttggtactccatactctgtggtgtttttagatctatcccgccctctccccacgccccctttaatggtataagaattggtcgcaaattataaatagtgtaaatagtgtaactaaaaagcggtgccttagatggcagtgagaacactgtctgattcaatgtcactcctttttaaacgtttgctttcttactatctctattgccgtgctaggcaatcgacttgttatccaagctggccctgatatgctgtatgtttgctttctataacacaatgcgcattatatcgtttgatcgatcacagctttgatttgcagaatctgcatggtatctatatacttcgctattatatatctatttcagacaccctcaattgaacctcttctcttagtatcatttccactttcatgccttcagaccttgttgagcagagatctaaagccaaaaaaacaagcaagacaatgttcatgatggaaaagcaaattcgagatgattgaattggccagtacgaaatcctcacttccggaaagaacaacctgcgcagcgcgcgcattgcgtctgcctcgccaatataaattggatattgtcttctctctcgttttttcttcctcgctcaccttcactgcactcactcttgagacctatcctgcgaactttgcaagtctttaccggagtgtatcgtctttctgagatactaccatttcaccatgcctccgcgacggaaacggctccctgcgagtccgtttgcacggggatacacaccccaaatgagagcggcgtcagttaaccctatctcactctaggaagcaagatggtcgctaacaaaatatcgatagcgtggaccgaattccaatcccaaacgagtcagtattctcatcagtcttggccttcaactgctcaccgtcatagaattaaatgctgcgtctgcaagcggcatcgcccacagtcccagtactcgaaaaaccaactgggctacctccgccgggcaatgttcgatcttggctacaatagcatttatgaccagcaggttgctaagtgtggcccatgcacgaatgcccaggtttgtgaggagctctgtcatcgttgcggtcactaccgtgccattgaccaattcgccagaaaccaacgcaatcgcgacagtccggtatgtttgtcgtgagctacgcactttggctgcttctaatacttggtcgatctgatagatctgccagccctgcatgaactaccagatgtccctcgatcctgccgatcagcctctggcgatcacggacaaaaccgtggttgaggatcaggtagaggatgaggatgaggatgaggatgaggaagaggagctcaattctgagtctgtgggccattttggatccattggacaacccgagtctgtcgatatctttggctctactggtcaggccgtaagttatcagaacgacatcagctctggtcaagtcttggtttactcatactttgaatgcaggagagtttagagcagggcatcgagacagctctcgtcctgcacgatgattccactgatagtgatggcaatgagagccggaacggatttgcaagagtcaaggtgggtgcctccatttaacagaacttatatcgctccggatggacttctaacaaaactttattgtataggcgcaccgtcctcgtcaggcgcctgtccctgagcccgagcctgccccaggctgggcacccggtactcgcaagatcaatgatggcactccttggaaaggaggaaggtatctctaatggtttccaacaccgtgccacgaacaaccctcgggttatgattgacgatacttctatctatgggcacctcggctgctaggctgcgtctggtgttgcagtttacggcatgctcttcttcttctacctctgtagtactcctagtttctcacttgcttttacttacagacggttcgacttcagggtctgcccatgatgtctcctatgtctccagacgctctttttttgctctttcctccgggaaggcgagtttctagtattccagccctgtgcctggtgcatgtcttacgggcaacctttctcatattctgattgatggggcttttactacagggtggggtggacttctaagtccgcgcctgatataaccttgtccaatgatttttctcgctttcttttctggggtcctagggttgatatgtttatgaagacccattagattcaatagtatttccaaggtttgccttttgagctcccatgggtcggtagacaatagtgccatggttatgacatcggtggttccgttgactccacctactataaatattgaaatcagcagcttagcttgtcggtcgagttattgtatgataatcgatatccaggcaagttccagctatttctggtgattgagaactggaaggcagtggctaataatactctgttctgtcgatcggtgtcccagccgtcggatccgggccgacatttggcaatgacatagccctatctttgaaatagtgcccttcacagctctgataggcgcaagggaaactataatgtacacattgcatggaagatgcatgttaagtctgcagcggttgctatacactgccagatacatgctctgttagtctgccgatcgtgtgactctgacccagtctagcaatatgaaagagcatatgtgggactttaatatagcaaagggccaatataacaaagagcgaccgtgtgatgtgacgtcgagacagtacaaagagaatgaatcttaaatccgtctcactcgtagtgacgatatgatcgccacaacgtttcactcgccccccactagcccctccaccgtaatttctagcaattcgtaatctgtgtgcgcttcttctttctagttattctcttcaaatcggttacattttgcaaggagaaactacacgtctttgctaaagagaataccccggctacatctaaaccctcaaacctccgtatggcctccaatggaaattacacgagcaatacagaccaaacgggcaaaatgaacccagactcaaacgagcatgggtacttgcccgcacgtccacttccgtcctattatacaccatctcctcagaacatgccgcagccacagatgccgccaactgggtcatcggccccaaatctaaccccagagccatacaaccattcggaatcccagcgctcctctccaaacatgcacactgggcacatagacaatgcagtgagctctgcatttcaaagtagcggctccacaggctacctctccccagaaattatctcgcagatcacagcaacagtgatccagcagcttaagacaaatgggttggacaagctacaagggtccggtgcgcccccgcccggctcgcaatcacggcagccgccatggcaaacagatggcttgttgcagccgcataaggagactccctctgccatacctccacagcgaagcagttcaatccccccgcccacttcggcctctgaaaagttccatactgggaattccgagccatacgtcccctctggttacgctagtgacagtcatctcagccagaaacctgctcctgatccccatccatacgtctcttctggttatgctagtgatagtcatctcagcccgaaacctactccagatccccagccatccgtctcctctggttactccagtgatagtcgtctcagccggaactctactctcgatcacctgtcggatagacgtgcctctgtctccagtcagactagtgatcggagtcatcctagttactataaggcggaacgtccgagacctccggatcgggacgctaccgttatggagatgactactttggagcgaatttgggggaaattgttcgatgatggcaaggcgacgaagaggcttggccaatttttgcgtggaattgcggttcatatggtaggacttttgtctactctgacctactacggattataatggctaacttgagtagattgaggattatccgccgggaaacacccttgtcattcccccttataagttgcaaaagttctatcgtgacactcatgattcgaatgacccttatccatggcaaggttggtaattcgatctgtttattgacatgacatattctgactaaatatttagacatttttgatgatcgtacatcttcgatctcccgactattccgcgacatcagagtcgaacatcatctcatccaggacgatctagcaaaacgcccagatatcccaggcttaacacccaaaggcttcgagacctgggaaaccttgatgatcctcgcgaacccagagcgcgaatacgagcgactgcaaaaagcagtccgcaacatgcctatcaacaacccagaggaccagaaagagcgcttcccaaaggaaatcccgcgtcggctcttcccagagatcgcagatatcgaaatcagagaagacgtcgaggaccgaatcatggtccattgcggcgtcgatctaccatacatcacacccgaagaacgcaaccagacttctggccggtcggccagatcatccaccacgaccggatcgcccggagagcgaacccgctcatacgagagaggccgacccccaaccgcctcggccccaagacctgccgtagtcccaagacccgcctcagccgtgacagacgatgaagacgaagaagacgaagaagaagacgacgaggtagacgaaggagacgaaaccatcacctcggtcccgatcgagcgcgaacgcaatccctacagcaacagtccaagcattggcaaagtctacgatgaacccagtcctagccacaaccacaaccacagccacagccacagccacattggatcgacaccgggacaagctccagcataccgcatgcccgagtcctacgaccgcgagtcgcaatacgcacgctcgggatctggacattcctctgagaagcggttctcgcatgatccccgcagctcgtcgcatcaccgcggaggcagtggtacctacaggcattcggatactgaattgcatggtcgtgaccattcggctagacattcagggctttcggcgcatgatctgtcgtataacgagcctgctgcgaatttgactgaggatgaggcgcgcagatatcgccctagtcggggtggcgacgaggaatattatcgtgggagtgggcagggaggagctgtaccccggtatgatcagaagtatgaaaagtattacggatgaatgtggatttggattgatttgttttagtgttttgggttgcttccttttggcgattattgcattgcagtcagtgtcattttcctgttcttctgcctttcatctcaactctggtcttaattttgattcttttcaagctgggcgtggcatggatccgaggatacccctttttctggggttgtgcacgattaacgatatcatatttcacgacgttctgctctttcgaaatacacgtgagtttgtaattttatcaatagcatcgagaatgaaaaagtgcagcgcatactcaagttgtattcgtctcacttcgacctctcaaacccaaacttcctcataaccctctccccatcctctctaatctttttgagctccctctccctctccctctcttccttctcatactggagcgcaatagccctggcatgtctctcctcacgctcaacccttttcctcgcaaccctctccgcgcgcctcttatgctccaacgtccgctcatcacatctctcagcatcatcgcgcagcgtctcgacctcctcatcggtcaatacccatggcacagacaagacttcaataaggaaccgcaggcgggtatccaggaactgcatttcggcgttcgtatcacgcacaagccagaaccgctcaagatgtaactgcatctgcgagcggaaagttgacagcgtcccttttacccggactagcgttcctggttggagagctgagatgtctatcttgttgtggtctttggaggttacgtgtgttgtttgggtgaggctggtggctgttggcgccgtgagggagaatgaggaccatgctggctttcctgggcctgtggctggagtttcctggctagtggtgccgggatttggtgaggtctgctttagtacggctatttcgattgttgcaccactgctgtcgtctagtattaggattgtgcgtcgtgggacatcagttcgcgccactatgatgcccactaggctaacaaattggattggatggttgttgtagaagaagatgttttggcctgtgggctttgtcagttatgaggcttttgatgcagaaataggcttggttgtgttttggtctgatggaggatattgagtaaaaaagaaggcatatttctgggatattttggagcccgacagagtattggaacacttatagagttcgggtataatgaaaccgaagtctaaacagcctggtggatgtatcgaatgaacttattacgctaacgccgcctcattatcgagcctccgcgctagaggacccggaaatatgcacatgagcactaggtgtgtcgatctgcagggggcaggctcaaaaaaagaaataacatacccacgaagtcactcgattttcggagacgatgcacatcggccgcacccattttcacccaggtaaagtgcgtgggtgacgccttgaagcagaacgcggggtagaatacgaggttctcatggttgactattgtcattggttcatcttttttctcgaagtatgcggaatcaggacttatgaatctcaacttgggaatgtcgatttagggatcaggagtaggcatccgagcatgagttaccgctcttgccgacacctgattctgcctaccacttcccacaccgcctttgtctagaactccccagtagcaagaaagagaccgatgtcattatccaagaagcccttcaaccagcctataatggcactatataattgctggtttctagcatacccacaatctctatagatagatatgcttatctccgtccatcatcctcttcatgggattcctcggcagcgcctcctgccttttcctctcctcagcactgatatcatcaacattagtctccttctcccccaatgcagcccttacctcctcccgcgcattctcatgccccgcaaaagcaacagtcaagatctctctctccaacccaccaacatgctcccactcaatgcccgcctgagttaacatccgacatccctcagactctccaacaaacgtgccaggctccttaaccccaaagtaaaccttatggaccccctcccgtccgccttccctcgtctgcgtgatacgctgcacacacggtgcattcccagacagccgcttcccgcacggctccatggtcacgtacatgacgagcttgcggccgggctcgacggggaggacttcgccgactttgtcgtcggggactttgtgcactgcggcatagttggcgaagcagcattgctctgcatgtgtattgcccgcgagctccattgtgtaccccgtcgagaggatccggtcgtctgtgaaggtggggtcgtcgtctttgcgggatagtagaactgcgccgactcggaagttggtgggtcttgggggggatttttcagctagagagaggcattcttttatgtagggtatgtgaggggaggtgtttgtcgtcatggtgagtgatgccaattgcgattaggctgggtgttcggtgtatgaggggatcaagttgcgctttagatgtaaaatttggattttgaattggattcggttggtccctgtagttctaaatcgaagagagtgaagtggcgctgtcgatgagcttggggtgcttgataaaggcggggagcagcagcaaaatgacgaaatggcccgtcgcgtcgaaatcgcgttccatttctacgaccttgtgcagtcgccacttctattatcaattaaatccaagttcagtgtaatatacctaggtatctaaatcgcactcggttcttcgtctggtgtttgagcgcccaaaaaaagcctgtcgtgtcaccaaaacttgcaatggcgaaaaacacgaaaaacgaacaccatgcctcagacgaagaaatgccgtctgtcgaggaagatctttataaaatcctaggcgtttcatccgatgcaaccccagaagccatcaagaccgcatacaaaaagaacgctttgagacatcatccgggtatgcaaacccacgcaggttcgaaaacagcatgctaatctcagagcagacaaggtgagtgaagaagcccgtgtagacgccaacgcgaagttccaaagaatcgcactggcttacggagtactttccgacgcgcgccgacgagacgtgtacgaccggaccggcagcacggacgaagcctttagcgaagatggcgacttcaactggatggacttctaccgcgaacagctctcggcgatgctcgactcgcgggcgatctcggacttccagaagaaataccaaaactcagaggaggaaagaaaggacctgctcgccgcgtatgagacgcacaaaggcaatatggatgccatctacgatactgtgatgctgtccaatgtactagacgacgatgaacggttccgtggtattattgaccaggccattgcggatgaggaagtcgaggacttcgcgcgatattccaaggagcccgagaagaagaaacagcagcgtgtgaagaaggcgcagaaggaagcgcgagaggcagagaagttgggaaaggagattgaggataagaagaagaagaaagctggggctacgggaaagagctcgaaggctgcggcgaatgaggatgatcttctggcaattatcactaagcgccagcaggatcgcggtgcgggcttccttgctcgtttggaggagaagtatgcgcagcctgggaagaagcgtggtatcgatgatgagccttccgaggaagcatttgctgctgttggggctcggaaggggacaaagcccaaagcgaagaggaccaaggcctgagttagggtctttgtttcctgcattcatgtgtcatgagcgtttgtctattgtataactaggtctaatcggtgtttgtaattgcataccactatatccttcttcttactgacatgcaaaaaagatgtacaaaaatacattccaaaagacatttgtagaaggcgtctgcacgcagccaccgcggctgcagtaagtagcctcatcttccaaggttgggctccttctcccaatctttcctcttagtcccttctttatgttctttttctttcaatctcaattacagatagtgcacaaccatatccagtccgtaactaagggacgtcgacttgattgacttttctggccatttgagctgtcaagctgtccagctattttcttgaattcttcctactcatgcatcacaactaaacctgacatacattcctatcaccgtcataaaacaaggcgacctgctccacattcctcattgcttggcggagttgactgctgagtttccccacagcccggaggcggtgccgccatgtcgcaccacgctggtcgaacttctcccactgaacaactgaaaagtttggatggtcgatctacaatatcaacgacctcaataaaggagaaaccacctggcctgaaccgtgccttgcagaacctgctgattgccccgcagtctaagagtgcgggcgggacaacctattcgcccagagcaggcggaacccgcagtccagttgagccactggtatcatcgcctttgcgcatcagttattcagatatggcatccgctccaagttcgccggaaaggcatgccgcagctcgcgaggttttccctcgtagatcatccgaccaggttgttgacactgtccgctcgactacgggtcgcctcagtactgatgatgatgatgcgaaatctgatgtcactactacttccctagagcagccacacgccaaaaagcgatttttgcaggctagagataggtctcaaagccgcaagggtgtggctgccataatgtctggccgtctcttcccgagaagcttttcccgtggcagagacagagcctcatcacaaggaccttcccagcgtggagcgtctcttgactcccgttctgcttcttcgccggagcggggtcgccccagtctccctagtagtcattctgttcacgttgaaaccttaactcccacctctgttggttcagggaaggggaaatcactgaacatgcacgatgcattcaacaagtcagacgaagcattggctaggccccatggaagtggaagcctccctgattatatcaaacccgctgtggaggagggaggggagcgaatagccaaggatgttttcgatcgtgacaagaacatgattgaaagcagtgaagatgaagccaacgacacttcgagcgatgaagacagcactctggagggtgtacgaggccgtaagaaaaagaaggactcggatatcacatccataacaccaagcgactttgagaaacccaagagtgacgattccaagcagtccgaagaacgtacgttgccttctcaggactatgttaaatatgaaatccattgtactaacctcatattttataggaaaagtttccggagttccaagtgaacgacaggagaagaaaccgcgaaaatctgctttgaaagctgtggtccatccacagaccagtttcgacatccccaccccacgtgttcagtccatcgccggcacaccttacggctcagaggatgaagccgagattggtgacattcatcgtgcccagaagctcagtatttccatgtccgctattgataacggtgtttacaaccgatccatccgaacaattgtccgcggggacttcttaggtccgcaggatcaaggcgatggtagccgtcgtcgccgtcgaaaatacttaatcgcaactgacttgagtgaagagtcggtatatgccctcgagtggactatcgggacggttctgagagatggcgacacgattttcgccatctacgccatgcacgaggactccactactgcggcagcggtgcaggtcggcgagggagctagggtgatgaaagatacaactgctgtcgttggcacccagacgaaagaagccaaccagcattatggatcccgtacaatccttggtcgacttggccctggtactgccagcaagacacattctgttgattcccgggcatcgtcaatcgccgaggcagaacgagtgagggcagttgagactgtatctcagacttgtgtgaagttgctacggaaaacgctcttacaggtccgtattgctgtggaagtgatccactgcaagaatccaaagtctatgatcactgaagctgtgagttttttttctccgttctcaaccaccctattatctctggtccatgcttacaatgactctcagattgatgaacttgaacctacactcgttattgttggtgctcgaggtcaaagtgcactgaaggggtgagtgacgatttctaatccgatcttatgctgctggtgacaatactaaccttacttttagtgtccttctcggctcattctccaactatcttctttccaattcctctgtgccagtaatggttgcacgccgaaagctcaagaggcacacgtggaaagacaagctcaagggcactgcacatgtgcgcctatccaataatctaattactccgaagagtctttctcaagccaaagtggattgatctggtgtgctttttttttcatgttactctctggcttgtcttttcactcatcgggtccatgcaaggcgcctatcttgcactgcgtttgaaggcgcattagacctgggttatcaatatctctatttaacgcgtatggataccctacttttcactggctcaggatctcacaatatgatggctctttcttagtttacttctcgttcttaacctgctcttaatttaggtcttcgacattattgcttgtggcgcaatctgctcttaattgcttagacaccttgaataacagtactttgtataatgtagaaaacagatatgttcctgactattgcttcattcacatgtaactatacctttgcgccgggcttcgacccattccaagttgggcttagctgggcctacaagatagggaacgagcacctaaacgccaagacatgacccggcctacgcacctcatcacgtgcaacgtcaccgcccaagctcccccatcgagacagctggaccaaccccccagtcccacctttgctctattccccatccttgcatttttctactctgaatttcgcccgtggaggatcagattcgctatggccgactctattgacccccggatgccctccatcaaaccccggttccgttacaataccatcggaggcattaacggaccgctggttatcctcgacaatgtgagttgacgatgtcctgacaatgaagcgggaactgtatgctaatgataaaattgtcaaacagatcaagtttccccgttataacgagatcgtgtccctgacgctccccgatggcacagagcgcagtggtcaagtgctggaagccagaggtccgttccccacattctgccgttccgactaggagtatgaaagctgactgctatatatacaaataggaaaccgggctgttgttcaggtgcggactaatacctcgtcgctaacatgaaagactttgaattaacgtggctcgtttgtgaattaggtgttcgaaggcacttccggtatcgatgtgaagaaggtacaactatccgttgaaatggtttgaatatgtgctgacatatcgttagaccaaagtcgagtttagcggccacagcttgaaacttggcgtctctgaggacatgttgggtcgaacattcgatggctcaggtcgagctattgataagggtcctaaggtgttagcggaggagtacttagatatcaacggccagcctatcaacccctactcacgagtatgcgcactttcaccgatctaagatggaactacggaaagctgacgaacggataaggtgtaccccgaggagatcatttcgactggtatctccgctatcgatacgatgaactccattgctcgcggacagaagatccctatcttctcggctgccggtcttccacactcggagctagcagcacagatttgccggcaagccagtctagctaagcccactaaggatgttcacgacggccatgaggagaacttctccatcgtcttcgccgccatgggtgttaatatggagacagcccgtttcttcaagcgcgacttcgaggagaatggcagtatggagcgtgtcactctattcctgaacttggccaacgaccctactattgagcgtattattactcctcgtcttgccctgaccaccgccgaatactacgcataccagctcgagaagcacgtcctggttattatgactgacatgtcggcctattgtgatgccctacgtgaagtctctgctgccagagaagaagtccccggtcgtcgtggttaccctggttacatgtacacagatttgtccaccctctacgagcgtgctggacgagtacagggccgcaatggttctattacacagattcccattctgaccatgcctaacgatggtgcgtttcttaagtcacactttcagcgaatacaactaacccataccttcagatatcacccaccccattcccgatttgactggttacattaccgagggccagatctttgttgaccgtcagctggacaaccgcggtatctacccaccaatcaacgtcctgccatctctatcccgtctgatgaagtccgccatcggcgagggccgcacccgcaaggaccactcagatgtgtctaaccagctgtacgccaagtacgccattggtcgtgatgccggtaagcagcccacccttccacatcccacaaacatctctaaccactccaaccagccgccatgaaagccgttgtcggagaagaagccctctcctcggaagataagctgtccctagaattcctcgagaagttcgagcgcaccttcatcagccagtctccctacgagtcgcgcaccatcgaagaatccctcgacctcgcctggagcctcctccgcatctaccctagggaactcctcaaccgtatccccaagcgcattctcgacgagttctacgcccgccacgcccgtaagatccctaacaaggatacccgcgataactcgcatgagaacttgatcgacgcatgaggaggtgatgtgtgttgagctgaattctagggcttgcgcatgttgaattaaagtactgttcttgttgtgcggctgttcttatcttttggttgttattttctttctattcttgctcaagcatgatacattatcgaatctatttcaggggctattctggctctataaaatcatgatcggtttgttcatcggttccgtgtgtatagaggtcttttagaagtggtgggtaatagactgctattgttctagaggttaaagatatctattatgaagacagtcccgaaagatgaagaaaaaacaaaagactaaggggatatcaatttttttattttacttttacccaaaaagagtcgccaatcagaacgcttttcccaaaaccatctcgcaatgtagagcataagcatcaaggcatcatgaaacctctctagcaagacagaaccaaaaataaaaatgaagacaatgaaactgtgaaaggtatttcattctatgcaaagatcgaaaagcgctcagaagcgcagatcccagccgatcttagggcccaatcgaggaagctcgtcggcgacctgctggacatccttgtcaccgcgaccactcaggttcagaacaatgttctggcccttgcccattgtcttggcgacttgcatcacaccccagacggcgtgcgaggactccagggcggggatgataccctcgtgttgggcgagggcgcggaatccagcgagggcctggctgtcgtcggcagcgatgaaggtggcgcggttggtatccttccagttgctgagttcggggccgacaccggggtagtcgagaccagcagagattgagtgggtgtctgagatctgcccgtgctcgttctgcaggacgtaggtgcgcacgccgtggaggacaccgtgggagccaccggagagggtggcggagtggcggttggtgtcaatgccgtcaccagcagcctcgacaccgatgagcttgacgcttgggtcgttggagaaggggtagaacatgccgactgcgttggaaccaccgccgacacaggcgatgacggcatcggggagtttgccaatctgcgcctgcatctgctccttggtttcgttgccgatcacggactggaaggtgcggacgatggtggggaatgggtgggggccgatggcggagccgatgatgtagtgggtggtgtcgagttcgacgacccaggcgcggagagcctcgttgaccgcatcacgaagagtgcggcttccagcctcgacggcaatgacggaggcaccgaggagcttcatgcggaagacattgagaccctggcgacgcacatcttcagcacccatgaagacggtacactgcatgccgaacttggcgcagactgtggcggtagcaacaccgtgctggccagcaccggtctcagcaataatgcgggtcttgcccaggcggcgggcaatcaaaatctgtccaagagcattgttgatcttgtgacttccagtgtggttaagatcctcgcgcttcaaccagatgttggcgccgccaacgtggtcggtcaaacgctgggccatgtgcaggctgctgggacggcccatgtaggggtagtaggagcggaattcttcccagaaattgggatcgttgttggcaatattgaagccgtgctcgagctcggccaagcaatccataagggactcggggacatactgtccaccgaactcaccgaagcgcgagggctgggcagatgcatcctttgtgacattgagggcctcgagctggtcggcgagaccaggtccggcgggggtgtcggaatcggtgatcactttagtaggttgaacctgagcagagggctgggccttctgaatggcctcgagaacattgatctcgtgagtcagagcaccggtggcatcacgctcacgtttgcgtccagtgatgctggaaaggtactcctcggcagccttggcagcctgcccagcaggggccttaccaacgcaagtgataatttggctgccaatgacaacaccctcagcctgctcctggacggacaggaagtgctcacgggtgctgacaccgaatcccaatgcagcaggaacgttgccggagtattcgtggacgcggtgcagaagctcggggatgtttgcgctcaatgaaccagtggcaccggtcacacccatgcgggagacgacatagataaagctgtctgcgatcttgcagaggagacgcatgcgagcatcagaagtggcaggggcgataagggggacgtaggagagactgaaattgagtaagcatgctgtataatcatagacaaatgataaagatttgaagagtaaaaatcaaggaactcacccagcgcttgagcaaaggtcacggaaacggacagcctcctccgggggcaagtcaaccatgataaaaccattgacaccagcctccttgcaatcacggagcatacgctcctcaccgtacttaaggacagggttgaagtaacccatgagcatcagcggggtctgcagaccgcggctgcgggcagtgcggacaagctcaaggacggtagtgagggtaacaccattctcaagagcctttgtgttagcggtctgaatggtggggccatcggcgatgggatctgtgaacggaatgccaagctcgatgatatctgtgatatgagaccgaatgttagtaaaggtcatccctttgatcaactttcactttgggttgaattaccggcgccgccgttctcgagaccgaggaggatatcaacggcctcctcaacggtggggtatcctgcggtaatataggccacaagggctgcacggttctgtgccttgcacttcgcgaaggtctgcttgatagcttccatgatgcagggtaatgtgaaagtggcggggcaaaagagtgtggtgagaaggaagaagagaagaggccaatgggaggcaaacgatccctatatatacgttcagagatgggatgcgttacacgttaattgttaggtcagggatggggtgagatgttataaaaaagcaaacgatctgtatgagtcaaatggaattgttctttttagaggccggtttcgctgggccccgcgtgtcacgtgccttgataagatagtgagtgtcacggtttaatgagccttttcccgcctttttctgccagctaactaggaagagagcgagggtatgagaagaaaatgttatctaaaaagatttctaataagacttatatcaaaaagacatgagaatgttgcataagccgctgactattcctgtacatagtagggatgatgtagggctgagatttccacgtgatatgctctacatccacattctacaagagaaggaaaagtgaaagaaatttcatctgcaatgtaaaaaaacttttactcggaataggtagattaaggtagaagataaggataatgaacggcccaaccgttcaggtcccaaacgccgtaacaatgcagtaggtaggtagtaagtgacaacaaccctcagctgaaataacaagaagtggtaagtaccgaatgaactccagccaaaattttcaaacagagaagtgaaaatcaaatagggaccatgggaggaagacccgagaccacgaagagaacttcatagtgtcagagatcctccacccaagaaccccgtccaaaaagcaccaagcaattggatgaaatggacaaaaccgccaagattcccaaaaaagaaacccaaagtctatcccatttccaatccaagaataacccgcgaatgcaaaaggaatgacaagcaagcgcccgctatgctgaatggtagtacaaaagcccagaatgtatgttttgtgcgcaaaaaagggagtggaagccacaatgcccggcatgataatatgcaacccaaggaaggaatgaataagacaccgtatagatgcgaggaagtctcaagtaagacaatgtccaaaatgtcaaaaaaatcaatcgcaggaatgcaaaggccgcatgtttgggtgtatggttgagggcatgaggcatcataatgtaatgtaaggacggacgtgaatcatgatcaaaatgtgggatgcgaggttcggcagataaaatgtcttttgataccttttcaggtggaaagagaccttgtatcagacggacggcaacccggtgtctgggcttggtaaggagcgacgtgaaaaggaaaatcgtatcttcaaaaaggcggaggggaagtatgaaaaatagaatggaagaaaaacgcagcaagaaatcagataggaggaccagccagcagggggatcagtggccgccgtgggcggtgtcgtgcatggagtacacgggatccaagtaggtatagcacccgccatttcctggtgcaccggtgtgaggagtgttgtggccgagagggtgcatgtcccaagatgctcgcggagccgcgggtggcagaccgttgtgatggctcatggctggatacgagtatgctccagcagatgtatatggctgggacactgcgctcatagaccggatattgggtgccgaagacaggtgggaggagtggtctgcctgcgagtaggtctgcacgggcataccatggtagctgtggccagcaccactgtcggagatagactggggggagttggcagtgtgaggctcggtgccggaatccgaaccagtgccatgactggcatggctggtataggtggtggtcattggtgtggggatggcactggcggttgaggaatagctggcagacttgatagaagagaagattagtaatttgtcacaatcagccgataagtttcaacatacgtatttcccaatgatcttcttcagtgcctggctcaggaccttccaagggaacaccttgacatccttctcgatattgcggggcttgggggcggggaagcccatgataaccttgaagaagtcttcgctctcgaccttggccttggagacggtgagggggcggaatccctccaagttgcgacggatccgattcttctcttcaacagtgaagcgcacagccacgagggactcgagcagatagatggtgtcgacactcgttacgtagcactcattcttgtcctcccatgaaatgcagctgatgcagatactgttgggggcgcgatcgtcgggagaaacagccttgaactcgccctggatggtgctgccagtttgagagcgggtgaattgcaccaggcgacgtcggcacgcgcgttcctcctttgtccagccttgtgtcatagtatcgagatcaccgttcaacttgaggatagccttggtgggatatatggcatagggattgaaggctgggttgtggggcatgctgtgcgtttgcatggtggaggtacggatcaaagtaggatttgaaggaccacgctgggggggacctttgtgctgaggaacatgtgtcaaggcgagaccgttccgagcatcattgctcacagagacgaaagaggggctccaagccggggtgataggggaagggacacggagggcgggctgggaggcggcagatacagaagagtaatggccggagccagtctggggagaggatgcagagtgatatggcgcgacaaatccaaccatggcgggaagaggctggaggtaaggcgagtaggacgctgatacagagcggccgtgggagccctcgtggtgctcaaccttggggatcacggatccgttgtgtcgtttggcagatgccacaggagcatcagagtatgaaaacttccgcttgcgggaatcccctgatggcgaagggtgggaagcttgctcataagtgtacacaccaacctggagagaagtggcgggacagtcatcttgggtctccatcaagacggacagaggaacagcaaaagatggggatccagtagacaagaatgcaggcacgtcagccgagagaccgtactggaacgcagagtcctggaatccgaggaaatgtggaagcgattcacacttcttggagccaaaaaccacatacaaagctgcgtatgaggaagcgtggaggtcataggggcactggatctggaccatcaccctagttccctcacttccccgctgggggctgtatgtcacaatttcgggtagctgacggtggcgtgcacccatcatgggcgactgagactcttcgtacgagctagcgtactcgttgggcagatacggaacacagtccgagatctgacttgcctgatcggccataggcgaggggaccatggcggtcgtcacataaggcgattggccgtagttcgagtaagaggcagcatcatgcaaagatcgagtggaaccgtaatctgtgtttggtctcagcacacgggatgttccgtcgcaaaccaagttcttcagctgcaacgtacctgtgatggcgccggcaacgggcttctggaaagcagacatggacaatatgggctcggacttggcccacgggccgtctgaaaatgcaccgataaactgtgatccttctgagtccgacagatccaacgactcgccgagtatgagaggcgtttgaaaatccgggtcgaactgtgacggaagaagaaacaggtcagcgggaaggtttcttatgcacacgggaagacagaatgcagtagaagattcaaacagaatgctatgctggaacacctatgcaaaacatgcgggcatccacaagagacaagtccaaagttaggctgggaatcttaccaaaacaccgtgtgtcttcgaataagccagcttgaagatgttgcagcgagtgcaacgagacagaacctcttgaagcgaatgactgggaatttattccaaacgattgtagggtcgaaaagcacaagcaagaatggagtgctctccgagacagaacgagcgacgagatgaagctgctgtcggtctcacaaaaatagcggcaacaaaaggcctcgaatcaccatccagcaatcaacgactaatgctgaaactaggaacggctggctgcagaaatcgactcagatctcgaccgtcgtgcccgacagttcataaagagaagccgaagaactagtcgcttgacaggagctgtccaagaaaggtccaccgccaattgggacgggagagccgagattggtcggaggatgacgagcaacgagcgtggactggcgaggtttcgcttttctttatttccttgatccgtgaggtgtttcgggaaagactttcagcagattgggccacgatgaagcagatgcagatgataggctactcaattaatgagtatacgagaacgttttcagactataggaatcggatgggtgcatagggggaatgaactcaccgagatgaatcaaagtgaaatagaaaaggaagctctgatgtgaaaccaaattcggccgttgactatcccagataatatgcaagatccgagggtcgtcaaacctgaagagaaagctaatgtcaacaacaaacacttgaccagagcgggacggggaagccatccgacggctttgacaactatcgtcatttccagtcgttggtatagttcagcgaatacaaattgcggctgcaaggagatggcataaaagatcaagagccgaaagaggaagtatgcaaggcacgaggggcacaagtgagaccgtgggcaaagggaggggtgcacatagatactaaccttaagctgataaagcgatctgcctgaatagttcctttccgggtaaccaatatttcctaatggctctgagaccctgccaaacagaggcgattccgcaagctttctggacccagtgtcttccgagacagtcaagcgatggttggatttccgtgtcctgtcgaatatcccgatatccagtgggtagtttcgcctgtcgcaagtacaaaagcccgaagcgaatcctttttttttttttggtttcgaatgttggaggttcaactgacaccgcggagcaaacgggatctacagagatatcgcgcaaacgccgggcaagtaacactttcttcgtccccttagatccaaatcggagtggttcgaatataaaaaagaattggcgaaaattccggggttcccaaaagaattaaatattaagtcgagttataattccaataaacgtagcgaacgtggttctcgtagcggcaggtaagcgagcgtaagagcgaacgtggtgagcgaatgtgcgacttagcaagtcataataaatttcaaagggggatggaaagtgggatgcaaggaagatgggaccagaagggttaaaagcaacgattgaggattatacggaatattattattagcagtcagaacagagcagggtcgtccctaaactgtatagggccaacttgtggggggagggattttgtttttttattttttattttgatttgggttctttttattctttttattcttttattcttttgcggattagaggattcataattattattaataaaccgaaaattcaattagcagactaaaagactagtgggaaatcctagcgggggatgcacagagggtattgggtattattacctttgtatgtaggtacatctagatgtatacctacctacctatgtccttgtacatcttttcccgtcacacagtctagggttagaatctcgagtctcgaatactcgaaatatcagaaaacaagggcggagcatacacaaacgacatgaccagtgtgtcggaaaccactagaagccgacttgttatgctttccgagatgtccgaccaagtccgatccacctggttttcttaagataggactagggtgttcaccaacgatctgggacttgctccaaccttctatttgcagaaccttgaattgatcattcaacaggactatagcggtgcatcacgtcggggacggaagaattggaacgtggtgaggttcggaataaacaccaatctggcggcctgcgccactagcaaaagaaaaaaaagtggggagtcgtccagcatgtgggagaaaaaaatattttatatacagaagaggaaggacgttaccatctacatgaccggttaccttgtgtgtatgttgtatgttgtatgttgcatatgtgtatgtgctgtttcctgagcatagcctctttgttagtactgtaaccctagacatccatgtcgaggtcaggtcggtccaatcagggttggggtctataacaaggactctctccgaagccctcctctcttactatatccctgccaatcacgaagcttcaccggtaaccctgttagctccctacttcagcttcgggtacttttccattcgagccctttttatcttttagtcttttctttccaagcatctccttacgcccacccttgggccatgccgcaagtggaaaaagagacccttcctcttttctccagatgctccactcacgatctccccaacggaatagggtccgtcacgatcgtacggagtacatagtacatacatctcgtgtcgtcatgccgggcaatatgacaattcacatttcccgtttcctgacacgaggctgcatgtaagtatgatgtgtactcccttaccaaagtccccggataattcccgatcgtcttttccacctgatgcattttggtaaatgtcagaaatatagaaatagacagcataccaaggatatcggacggagtactccgtaaatcaggaaaggataaatatcggattacacttaccttggtcatccaagctcgggttttccaacacgagtctaagtttagcacaccttgcattttcaggtgactcggtggcctgactatgcaagggtcctgcccggtgattggttctctgatcttccccctagacccgatcgggctatcactcttggacatccgtgctcccctcgaggtaacgggaccgttccattatcagctgcttctgcactgtcaccttatccgggactcgtatatttagatcggcttcgtattgagatcggcttcgtattgaggatgtgatatgatgtcgatattctgcatgtacatgtactaggagtcgtgtacccaattcccattccaacggctcccggcccacgggctatctccaatgcgcaggagatcattagtgtttgaataattacccgatgcagcacgtcgaggtctgcagttccgtaggaacgtcaaccatgctattgttacagatgcgatgcagatgcagccgcggacgcagacgcagacacagatgttgaaaatagaataaatctccgtacgggtttcttgtttgtttcttgattctatttaatcctaggtggcctctatgagatcatagactgaagggctggatctgatatatcgacattattgacataagtttatttaggtgttgctgactccgacataaataaaagaacactaaccctaaccgggacataaacggtcggatgcacacctccgactattatttcgtgcagctccagccacccacgatgtaggaaagggataaaaaggggcagataaaaactatttgttttgaagcgcgttacctatcgataagatatgcactcgactccgcgattttgccacgttgaagacgtcccgaggtacgatgtactccgtactccgtgctcggtggacactacggagtacggagtatgcgattttatgtatccgattttatgaccaaatcaaggcatcactcaaaattcggtaatggggctcttgagaaatacaatacaccagtggagcgcgcaatgatcaccaatctgcccaagaagcttcaatcggatcagcgatcgcgtccaaaacagtcaacggcttcttcaggcatcttcggttaacagattagattattgtctgatgccttccttcttcccttgccattcgtcaccggatagttaataatcttccctacatgcaaactgtatcaatgtccatgttcgtgttcctcaactcccaaccaccccaaccaccccgaatcactatcaaacagagcaaggagcgcctcatccaagggaccaatctaatcaatcccaatcatccctttagaaattctaaaaaccaatggataatcttattagtttgtaacggaaacatttctccaattggcgtttgcactttaatcggccaatcttcggaaggaatatcagtctccacctcgaaacccaacccccccgaacacccgaaaaggaaaaaaacgcgaaaagcctgtacgaattaaacaccaatgcccaaaagcagagcttgtatcccgactgatcaatcccgtctcttggctagtgtgtcaagcaataatttggatcttccatgtccttggaaccttccaaagtaagaagcggatcaccatatccccagttcggacttgcaaccttgtttgaagccgccaatgctgtacgcgacaatcctattggcaggtacacgccccatccatatccatgatgatactattgaccgggtggatatccactactccgtacctagggcttcgggctctccggttcctgcttccatcttttattgtttattattctgcttattattctgcctattggcaaaccacggatgcctatcaaacgttaattggagactattacatactagattattccgcgcgaacgacatgctacccatatgctttagatcgacgtttaaccctaatcccttgtatactaccggttaaaagggttgaacgttacttcttacccacttaccctttctagggatccaacattgggaaatatgcaggtacagacgcactattgcctgcgcgtctacttcctatccgccaatattatgtacgtggtcgcgccactcgtgcctgtctgtgtatgtatgtgtgtgtgtgcctgtcttgcgtgtgggggggggcaccgagcacgggttgaggaagattattgaattattgggtaaggatcttcatcatcgatcccttcgagggagaagtccagggagaagtccagggagatgactatcaaccttgctgtatagtaggatagggattagtgtgcgggccacggggaagcataccctcggagtgaaacatcctcagagacactgacggctcggtctctctttgccctggttcaccacccttacattttatttcagctcctcctggttctgttcgtgaaggagacaaacggcaacgatcctcggtttttttaaccggtgtcttgatggggtggaagatcactggcctacccttgttcgcatcagagtttagtctgcaccacagctcggaggaatgtgacgtggacccgctttgtcttggggtggttcgactattcactcacatctctgtctgttctggagagaatatcggtgttggtatctttattctacgtgaagggagaagagaaaagacaaagaccggcttttggtgttaggcctactggagttggacgggaatcagctgtcacccggctatccgtgacgaatggcagatgaaaatcggcaaatcaccactcggcatcgactgcatgtctttggggactcttttctcttttttttttgcccctgcaacgaggaccttctcctacagggcagcctcttcgtcgatccccccatcgcagagagggaggtgtgaatccttgacatcagctccatatcgatggccactcatgagcggttatttctcagtgggaactgccgttcctagctttaaccttctttggcccctgtcggaaaagaagtggctctcagagtacgcaatcagtacaaagtacgtacggaatgcccgacaaatgaatacacccgaacttagagcgttaatggggctcgaccccttcccctaggatacttagcgcctcacgactattcacggatgtcacagataaaaaggaggttaacggtttcaggaagggagctaaaagctgacagatgccgcttcggttagtgtacggctcggcagtattcgcccacactttcctctgttccccggtagcatctcaaaaatgagacagtggcggaacaagatgatcatagacttgcggtcaaaactgacagcaggaatcagcctcacctttgatattgatatttgtcacgctcccattttcaaagaagtgaaagagggctggctaacaggtatctctatcaccgatgctgcttcccgtagtatctgaatcgaacctattcatctcaagctcgcatgtctcagcgtggagagaataattagaagattggaagactgccaagcatgtcttactcggtttcggggactctttactatttgcaaaatgtctttagcatgaccaggaagtgtgtcacgctaacactgttgatctttacccactggcgtcgttattcgttgatttgtatgagaggagcctctgtccggggacgctagatttgacgcgagatcccgtgtcctttgagttttgcttattttttccatctcgtatcaagaacttgagtgcatccactcatattagacttattttagctctctaataacgtgtagcttcctaggcgctatagccgagtcaggggttgcgagacagatcaccatgacgatccagttcggattagaagcttgggcggaatgggatcggggagatgttgaatgtactccgtacgattatagcttattcgtatttgcgatattacatggatctgatgggtgggagatcgtagtacatcaaagctctgaactttattgtttttaagttatgaaaaatggctagtgtgaatgatggtaggactaaatatatatcggttgttatagagcaatatatagagtatatatcaccacaatgcaacagcagataacttccgattgcttcaccgcgccaaacgccatgataacaatcctcaccaaaacccaatcgaatcgtgattcgaaaccatctaagtcgaagtacggtttcaggttgatggaaccgacctaatctgtagcgtgaaacactttatttatacttcgacatacaagtttagcttgatgtttcaacccactttaagctaggaactaaaataaggaccttcagagtcgtttataacattgacgctataatatactccataactagcagtcggttctccggacatctaccacacggtagagatatatccatgaagtgggggggggcgtaaagaaagtcccaccaatcagagcacggagaatgaattttcaatcccgggatcactctcttcccgaggtccgaacttttttagcagcacttgtatccaattttggcagcgcattgcgtaccgaatcgagttcgttgcttcactaatagccccagtcaaccgctcctctttggtcaattggtagactctaccctggttccgacgtaagtaaagtgcacggtctatttatccatcgctttccactttttttccatgctacactgtccccacttgaccacgttgagtgcatatttagtccgtgaatgccaagataggcaacactctttagtgcaagaaccaaggtcggcttatcccattaaccttttgttaagcttaatctatattggtagcgaccttccatctatggtacatgatgtacgagtactacatcgtatatctctatcttggatatgccaatataaaagacctgttttcttacttcgctccactgacgtatctccaccgaattagatccacaaaggcgcaagagtgaaaacaagaatagcaactaacttcgtcgcaccaagcacatccatgattagtcaacataaacatatctgtggggaatggagagcttggcagccggaaggggcatagtccactagcaaagcgaccggaagaacgtcggaagaacgtcgaagcctaacccaacccgagtcgaaaaacgccctctaaaaaaaacaccccaagcccacccaaaccacagcaaaagacccttcggaacatacccgagtcggggggagttggagaccctgaaaagcggtccacgaggttgagctggagagcgttgcgctaaccttgccaagcccaaccacccatgcggggcggtatacataccgcttagggctgtctcactttttagttcgcacttatcatttggcatcgagcttagtgtcccccgtgtggtgtatggactccataatagatgctattattagcgagcgggaagattgttgtgttactactactccgtacaaccgactgaatttcccgttgactgcctgatgcagcatgcgggccgattgcgttttgagatcgtggacgtgaggtttgcatacggtatacagcatattgcttattgttggctgttcagctgttcgactagaacaacgccctgctagaagtaccggagggcttaggacccctcaaagcaattgtttggtttgtcgattagagttatcggtgaatattagggtttgatttcgatgcaacggtagtgttgcagtctgttgcccgatcggttgcaagtacgtcgatcgctgaggctgctagttcatggtacgattagggttatttttttagagtcatgccgtgcgtcggggtatgaccaaaaagacactgcattctgacggctaacgataataatagactcggcttctatgcggcaagctgaaatgagacacgatgatcacaaccgcacggggcagaacaaggtcggaacacagagcaatgacccacaaacttctagaaatagcagatctctaaacagctaagcagtatcgtacccactaaacaatccctctttggacgattcgcccgtaggaacagcaaaagaaaagcaaacgcggcgaggccgaaggaatcctctagaagatggaagcgctctcgtaaacggtgcggtcgtagcagacgggaaaaagcttagaccagaaagcgtacagttcgggtctgtcttcccgcacctcgaccagccatttggcgaatgcgaactcggtttggaagggattcgggcttcgataaggagcgacctgatccatgttagcgcgggactagctaggtacctggagtcaagaccatggcgataactcacctctgaatatctctgcagcgcctgatgatacttctctgacagaccgagcttacgaagagtcggcatgcggattcccttcgccgcgatgctatatgcatggttgagattctcgcgttcgacaaatgagaactctccaatcacgacgcctcctggcagcttcttatgctgatgggcgtgagcaacttcgatcagacgggtgagcaagtcggcttcccagttctcgaaaagaggatggcggaattctttgatgtgtcgctggagcaaccacagttcacgcttcagacggactgtattggcttgcagttttgcgactcttcgttcgatgtgcttgttgagggtttgcagggcatagtgagtggcgtcgaaggactttattgactgttagtacattccataggatcgatgtttccccaatgcggcaatacctggaaactatcctcgtcccatgaatcttctggggcacgatgggagtctgatatacggggcacatggccatttccgcgagaaacggagcgagagactcgtcgagtggagatgtgatccctcttggagttcatagctggggtggaatcggaaatgaatggaagaattgttatacaatgagcgaattcgagattcagttactcgatttgattataataagtgaggatgaaatataagagtggcgatggcatgctgaagatgagaataagtaacaaattgtgacgcggtgatgcgtgaagtggcccagggggaaggcacgaagaacactggtgattgctgcaaaatatctcaattgatatgtatcataggtgtatagacagccatttaggcatcatgaattcatgggaatcgtagcaataatatttcacagcttactgcccgcagacttgccaaattcaatcaccagtttgccgaattgtgtgcccttcttcatatcttcgaacagctcgtcgattgcggacaagtcatctagctcggtctgcagaactcgcgacaccacaggtcggatcttcttggccttgacgaactcaatcatctccttgaactccttccgggagcccatcgtggtgccgcggacgtcgatattcttgaggacagcagtcatggtgaatggcatcttaggagacacagtcattccatagatagagaggacaccgccggccttaaaatgtgagtactttcatctgttattgaatgtatatcccgttgtcgcactcaccttgagtaacttgacagatttctcaatagaatcaccaccggcaccatcaatgatggcatcgaagtttctctttccagttgggagcatacccaacagcttcttttcccagccatcttccttataactgacaccaccggtcgcacctagctcaacggccttttgaatcttctcctggctcgagctcgtcacaaagacatacgcacctctggcaacagcaaatcgtagcaccatcagagccacacctccaccaataccagtaatcaagacagcagcaccattcccagagttcctctcaccagccttggtaatcagagctctccagcccgtcaagcccgtcaggggcagagccgcagcctcagcatcagagagatactcaggggcctcctcgacctccgagtactcgatggtaatatattcctgcaatgtccccttatccaaaaccttggtgcctcccataattcggtacccagcaggatcctccgggccatcaggcgaatccttccagccagcaccgggattcaagatcacccgcttgccttgccattgctctgggctgggaacattcgggccagtgccgacaacgataccaactccatctgcgagcagggggacatcgaaggtcacgccggggtagaggtgttggcggaggaagaggtcgcggtggttgagcgccgcggcggtcagtttcaccaatagctcacccccttgcggggaaggcttaggcaccgttcgtagggcgagcgggtaatagacttggcctggtttgccgggcttgccgtcaatgggagatatgtaaattgctttggacattttggatgcgatggattgatgatatcaaaaataaactaataaactgaccttgactcaaatcggggcgctcatgcggggatgcttcaatgcttatcgatagccgaggtttctttgatttcttcgattacacgcctgggcccgaatgtccgagactatatgtcggacgattgatggaaattggaaacctgtatctatatactctgatagagttcagaacgcgaagctcgaattgaaacaaatcgtaatcaaaagcaacgagattcatagtgttttctcctgacgtcacagcgcttagggctatttttgtagctgctgtactatagcctttcacagtctttacattgtctttgtgtgctgcatatttcgctagtatatcaggagagctagtttagaatatttgagatctgctatccgttgttggttttgcatctcccgggaatatatattgtagctggcaccgaaatatcaagaatcattaatcatccccttctctatgcgatagtagaattcatgctatgtttgatgaagttattgactacataaatgagagggcttagaccttgactataaaacagagattacaataatgccaaaggaaatgtcagatttgaaatacaatatcaatttgtctatgagcgtctcaataaatcaaaaaccgtacgtcagtcacgagaagaacagtaggagataacctgggcctctgaggaaatgagagaaattccaacaaagctccatcaatggcaacagacaggaaaggagaaagcagcaagagaaaacatgaaaaaagtatgagtcgtccttctattgaaatcaaataaaaccaccgagccactgagctgagactgttcacttcctcccgcaaacccagccaagtccacactcgaatctcggacgacagcggtgataaaaagtacaatgtctctcgtccacatccctatcatggccaggcatggcctgaatagaggtctcagaagcagcgtcataatcataagtataatacccagagttatcggcatggaacccatccacgtggaaacggccatagtgctgagaatctggtctggaagacgtacgcttggatgaaggcactggctttgggggaggcgtcttgttgggaggagaagcagaccgtctgtaagtgtattttgggtctgatttgacatccaagctgtggcgggacttttcactcgaccggggaaagcgcgttggagatggcgtcggtctcggcattggcgaaggcacaggcatataagctcggcaggattccgggtggctttcgcaataagatgctttgcgacagtggtgttgaactactggaccggagcgtggtgctgtggtgaatctctgagctgacatggcaggtttgttgggacggggagcatgggcctcgcattggcatttctccatctgcggatgatgctctggttcgcgtttggaggtgcggtggccgctgcggcgtcttctgggtggttcgtagtctgaaaaatcactgctgttcggagttgtgggacgtgtgtcgttggagcgacgctcgcgtcttgttgagtgacggttatcatatcgttttgtggctgattcggagctagaatagtcactgctgcttggtgtgatcgggcttgtttcgtgcgagcgacgttcacaccgattgtcgcaggagcagggtatttcctcaacctgcggaggggatccaacctcgcgtctgatagtatggcatcccccacagcatactatcttcacctcataaatagaggagtcagtgttggccggggatggggagcgtgtcctgtgggagtgaatcgcgcatgtgctgctgcaggtacaagatgccttttctggaatgggagatggcgatgggcatcgactgtgggcacaaggttccgtctcaggtccgtaacgaactagcctgattcgcccgcttcgagaaagtctcttgtccattggctcgccagcgaagtaccagccgaattctgtattgttgggtttggatcggccagtgaatctggaccgtctcatcttcttcgatcaaagacgacgagcactgggatagtggagacacaaaagagaaaatgatctttgttatgcaaaaaagcttatagttcatagaaacctgactggattgtcttggggcgaaagaaccgtaaagagggaattgccggagagggggatgccatttttatagagctttgataacatctgtgaagctccaagactgagctcatcatatcatagacattcattatgtcgttttgcgccgtctctatgttactcctaaagtgagcaaatctcagacagcattgtctggtgcagaatgaagcatcaaaggacaaacgggaacagtagatgtctacaaagggcgacacaatgatctagccctattgacaggcacaacagaggatgatattttgaatccaaccggatgtcagcccgaatcgaaagacataagaccgttgaacctttgcaagccagtgtatgtttgcccagcattgcagaggttgggtagaaagggatagcattagatgcatttcaacctcctctattgcatttgtgggacaactagactcctttgtattcctagacaaagcaccaaaccaatccctaactgtcaactgtttgaaaaacagctgaactccaatcaaaagaggagcgtggcttttgtggagaacacacgtctattcttttgtttccacgtctctctgtttgcgtcaagccacctaactgtatacgtacttgctagctatagtctttttgggttagggaaaattagcaatcaggcttcaaattcaccctaattgtctgaaaacaccatcatcgtctcaaacgtctcttttctttaatacacaggattgggcacaatggtgtagaacaaggtagaagatacattgggcagagtatgcagacacaatgttgtgcgtgtatcggatacctgcgcttggcggtatgtaatgatagctctacaaatacgctagcctcaccactcttagacggcaaatcacgcgaccgctagtaatctaataccatgtatttacaacaaggcacaaatattgccacggccaccgcttaatcatttttgctctaggaaacttcccaagcgaaatcgaaactcggtctctctctttctcgaccttgttagtctggcgctcgcatctctgcattacctctctcacagctctctacatcttcgattgactagctcctagctgtcatattccaactctacaccaattttccaatctcgtgtcttgcaacctatccgttcgcatcacacattctcttgcaagcccgccacaggtttcgcgataactatctcagaatcggtttttacgtgggggatcaacatccgaccatacaagcctctttaccacaatgcctacaccacttccatctagtttcgcttcggccgctgccggcaacacccaggaccccagccggaggggggatggttcgactagcggagaatggtacgcagccactgttttgccttttcaaaaactgctccattagctgttgctcaccaggctcggttcaatatcattgcttgatgctgtgaccatcaatgttttgagctcaagatatccgatgctaaccttcaatgcctactaggtcccgaaaccgcatgaatggagctacgcagaccttccgccgtccttctgttgctactactccctctcaccaccgggatagtagccagcctgcatctgcctcgacacccacggccggcggcgcgtacatccccccacacctgagctcaaatacttctagcattgcacggaatggggacgcccgatactccaaggatcaacttctagagctgtataaatcgcagcgggaggaggggaccttgagtaagaacgtggaggaatacttcgtggccgactgggatccccacaccgtgtcagctcctgtgaatggagcatgggggaagcgggatgaccacaagaacaactccgcagggcccgaggtttgctgggatcacggtggccaggtggagcccctgggaatcacgggtatgacggaggatgagagagaggtttgtgttgtgccatgcgttcgggtctgagtgagtggtcttgctaaaaagaattccgaatagatgttcgccgcttcagtcaactctcctctgaagccacccccaacaaacgccgcgaaggaaaacgttatcccagggaccggaggtcgcaagtcttcgatctcctaccctcagggccatatcaataactacgccacctcctccccaaccgccggtcgcccgggtccccgacgccgagaaacgggagaatcaatcggcaaccctatgtctcctaccggttccagctcccgatttttccgcgatgaggccaatacctctacccctccgccggccctactgcgccgcaaaactgatttccgagaatcaaacccgaaggtggatgagaaggccaaggatagcagggacgaccctgcctctccctttagctctttgaaacgcagctccacaaatccaatcaatacgggcgttggtggaccgaactctccctggggttcggcctcgcataatgccaatttctctccgatgggtgcctttggagctttctctcttggttccggctctggctctggcactcccacgaccgaaaagaaacccggatacggaagtctccgtggagaaagcagattcaaggggttgctgtccaaggatagctccgaagatattgccggttccgctaaggaaaagcccatgggcaaccttgaacgtcttgctgaaaatgacagtgatgcgcgttcgcagtcgccctggggagatgctgtcaagactcgcgccaaccgaagcgaaactaatccgttcgacgagcctcgcagtggcagcgctgctcttggtgggtctcaggatgttgaaggtcctcctcagtctgatctcgggtttggcgcattcggcatgacctcgagcattcccggattccgggagttgatgcaaagccaggagaactcgcggaacccaactcccagcctactccagggccacgagccaaatagtccaactaacactaatccttaccagagcccgcatggtgatcgtcatggtgaacgccaggaacccgaagatgtcgacactgacggatcggatattcagcctgcccagcatcccggaattagcggacttcgggatcattccaacccattcggcgcgatgagacgggctggctcagggatcgatcttcctactgtggaccgcagccagaactccagtgtcaacgccaaccgcactttctctggtctcggtggtctcggtggtctgtctaccctaggcggagcgtcaacttggtcatctggggctgctgtcggcactcccactcgtgagcgttctgcatttgttggtggtttcggtgaccccatatttggctctatgggcgatctccagtcccctagcttgtcaaccctaggtggaggtggtctatttagccctcacgccggtatgactggcactggaagcatcggccgatcaagcaaactcggtgccctcttctcttccatgcaggacgagcaaggaaggcccggctctgtgggcctagatggactcgacccttcgcaaggcgacaaggcaggtcaagcaagccaccatggctcaacgcctacttcgcaaacacccgtctcggccgttggctctattccaaaccttgctggtcatgacattccttcgagtcaaactcctggcgcaggcattcctgcttctcagcagcgtaccatggttatgccggataggatgcgttggatctaccgggatccgcaaggcaatatccagggcccgtggactgggcttgagatgcatgattggttcaaggcgggcttcttcagccctgacttgcaaatcaagaagctcgaggacaccgaatttgagcccttagctcagctagtgagacgcattgggaactcacgcgaacctttccttgtgcctcagattggccttcctcatggcccggaaccgacagttgcccagtggactaataccaccgccggatctgctcagcctcccttcccgggtagtttcccaagcttcggcaccaccttgacagccgagcagcaaaatgcgctcgaacgacgcaagcaggaagaacagtacctgatggctcgacagaaggaacacttagctcaacagcaggccattatgaagcagatggctcctcctggtgctccctcatcctcgctgaacccttcgctgcagcaccagtctagcgcacatagcctccaaagccagcctagcttctcaagcatcacttcacccgttggctaccagccatccccgatccaagctcccatgcaacagcagtctcaaggtatccctggattcttcgatggtgttgcaccgaggcagggcggtttgaacgtgggacccggaatgctgggaacggatttcggcaaccaggatcagctccctgctctacttgatcgcctgaatatcagccgccaggatccatttgcctttggcagtgctggttcattctctggccgccagcccgataactttttgcagtcccagcaggttactcaaatgcttcaggatcgtgctcagcttcaacaagagcaagaggactttgacaaggctcatgaagatgatccatttgatcagcacgctcgcgaggagcgtcttcgtcagttccatgccttgcgggcccaggaaggcgagatgggcatgcgcaccgctgaaggcctgcctacccaccctgccgccgcatctcggcaactcgaagcagaggttgcggccgagatggaggaggcagctcaacagttgaccgactctgttaccggcgctgagcctctcactctttctcagcaagtccacaaggctgcttctgcccaacgccagcagcaggaacatgaacatagccatggccctcctgaatcggtctggggaaacaaggttgaccacgctatgccccaacctttccctcccccaccctccgcgtcgcctctccctgcacctaccgcccagcgtaaccgccaaaacgtcgccgagtctctggctaccgggtcccgctcccagactcaaactcccgttgacgctgcacctacctccatcgcaccatgggccaaggaggcaaatgacttgcccaagggcccctctctcaaggagatccaggaagccgaggctcgtactgccgcccaacgcgaggaagtcgccgctgcggcacgccgtgcccaattcctcgcagagcaagagcgtctcagccaagcgcaggcacaggcagctcctgggctcccttcgtctgccaactgggctagcgctggatctccggccacccctgcctcggctgggtctccttgggccaacaagacccaaccaacacccacggcaactaccgctaagaagactctcgctcagatccagaaggaggaggaggcccgcaagaaccgcgcggctgctgccgccgccgccgccnnnnnnnnnnnnnnnnnnnnnnnnnnnnnnnnnnnnnnnnnnnnnnnnnnnnnnnnnnnnnnnnnnnnnnnnnnnnnnnnnnnnnnnnnnnnnnnnnnnnnnnnnnnnnnnnnnnnnnnnnnnnnnnnnnnnnnnnnnnnnnnnnnnnnnnnnnnnnnnnnnnnnnnnnnnnnnnnnnnnnnnnnnnnnnnnnnnnnnnnnnnnnnnnnnnnnnnnnnnnnnnnnnnnnnnnnnnnnnnnnnnnnnnnnnnnnnnnnnnnnnnnnnnnnnnnnnnnnnnnnngagcggaccgtcggtgctagtggcaaggtcaagggtgtgccaactgcgccagctcttggaccccgcacggctagcggaaccgtcccaatctcacctctcatcgctaagccccgccctgttaccactacccgtacggtgacaagcggcggcaccccccagtccaaccccaaccaggccgttgaggagttcactaagtgggctactctggctctgagcaaggggttgaacagcagcatcaatggtgagtttcgtcctgccaatttataccgtctccatactaacatcttatctctagtcgacgatttcgtccagcaattgcttttcctacccgctgaggctgagatcatctccgactctgtctacgccaattcccagactctggacggccgtcgcttctcggaggaattcatccgccgccgcaagcttgccgataagggcattgtcgaccccgtctcacccagtgctttcggtgagcagaagaacggcggtggctggagcgaggttgccaagaagggctctgctgctaccattgcggctgctgctcagcgtgaggaggaggctgccagctctgcgttcaaggttgtcgctccccgcaagaagggcaagcggtaagggtgtgcattagcttttctgttcaagctgttttttgagcctagatagctgagtcggatctgttgtttctatttatgtgagatacgtgcccatgtttgttgcgtgtcttcgccgtgtctagcatcatactcctagtagcattgatatcggttctgagttgtgcatctttttcggacgtacgtacagagataccttgtagcaatatccggagttagatactgcgtgcttattcagcaccgttccggtcgtgggaggtggtcaagtcgacgtgacctaacatccattgtcttctaatcgagtcaaaacatacgtgtcatagtctgagtcgatgaaatatcactggtttatattattcgtttcatcttgtatgtttcattgctgttttgctcgcatgatcgtttagtgctgctttcaatggcaccattcagttcaccagacagagttgaggtttcagggaagcacttgaatggagttttcttcgccaatattaggctgttttgtatattctgtggcatttctcgagtccaaattactgttttcagtctttcaataaatatcccttcaaatgaacatttcaccacatcatgtgctagttgaaaagtaagacagctgcagtgctctcttttagaattatgcagcccatatagagaggtatggtaccatacattggatggtttctttgtgatttagaaataaaaatatatagtcattgtgcctgtaactggagatatagctcttgaagatgtcttataagcccgatgacctatctgtatagactcaatactggctttgataggagagacgacgacaaagccctgaaccatttcgaaaaactgaaaatagattgcatgacgttaaataggtgcggcaggaactggctcaatagtgtcaaatataaatcataacaagcatagctgagttccacccctttatacacacgaaattgtcataaacagatcataaataagttaaaaaaaacatgtccagtgcaatggtcgccatttcacgcctacatacaggatctcataagtaaggatatgattgctttagactgggctctgcagtgcgactcgcctttgattgaagggtcccaacagcctcttgattcccatccagggtgtgttgattggactatcgattccagtatacaagaacaaatcgtagatccatcccccgaaggtgcaacctaatattggtgcaaccataggaatctgagaaagaaacacttgtaagccgagaaggcccggaaggttcaaagggttgacccaatgcccaaataaaacgtacccagaagtaataaccccccgcagcccatacttcgtgtccatacccaatcatataggatgtcagccgtggaccaaagtcccgtgccagatttatagcatatccagtctcccatccaaagcacgcgccaatgccaaagataacgaagaatagtgccagaggtatcaggggcccggcgcctagattgccgtcgtctttcaaagcgaacatcatgaacatcaagaccgcactggcaagaaactcggagaagaattgacccgtttttgtcataaattctgctggataggtgcaaaaaatgccgcctgttgctgtagtcgagtagccggggactgtgcggatatttggcccgccctcgtagacgttgatggctgacttatagttgccgtacacgatgacagaaccgcacatcgcgccgaagatctgggacagtgcgtacacggggaatttgcgccaggggaacccgcggaggacacagtttgcaaatgtcacagcgggattgatgtggcctcctgatgccccgctagtgtatactccgagcatgacgccgagtctggtgaatggcgttggttagaagggagtattgagtgatgatagaagaagaagaggcttacccccatccccaagagatagattggtagtcacccttttggccatgactgagtagcacctgagcaacgaccccgtccccaaataaaattaggatcgttgtcccaaagaattcagagaatgcatcacggaagtactccctcactttgaaccagagcagggggcgagtataagggctttcgacttcgcggttgatgtgatggatagccgtttcgttcttgtcagtcagacacagcgagccacagccactgtcatgacttgcaggggagagagtttcacggcggtcttttgccattggattaaccttaagctctttccaggtagccatcgaaaggagagcccaagctctaaaagccagggttgggccttcgaattgatatagtacgaccaaccggggggaatctcaccagccacgcaaaaatgatatggtagtccccccagtatatcaacggcgtagaatcagggacgaccgtgtaaccaaccctttgccctcaatctatcccgtacttcatagaagatgatggctcgattggctgatgcagggtcttgtcctagaagagagtgtgtatctgtgctgtcttgtcctcttggttccggctccagagccccagagggcgtgcaagcttacaggaaagatatcagctgaagtcaaacccgggatcaagtgcacgtatgctttttattaaacttgctgggccggccattctcctttttgttacggtgtctttttatctcacctagagcagaaatttctgacagcgcattttcgctcatagttcattccagggaccgtttgtaggaaaagccgtctggcataggaagccggaagtcaccgtccgatccggttgggctgtttcctctcttttgggtaatcattggacaccgcaatgttgtatatagttcccacttaccggtatgtgtcactgtaataactgcaggaagaagcttctccgtcttctgctactcatcttcaactcttcaggtgccggaactcatgtaggcccaatcgcaagtttctagaaagtccaaattgtgtcacctcgaggagccagacttctccaaagggaggcgagggtaacggaaagagattggtctttccccatgatgatgctgagggttgtattttttgcaatcttttctcgtcggcagtgacacagttgacagttaaccgtgtgatcatatgcttagaggtagcatcgccgagaccgggttgtccggtgtgatagaagtgatatcttgccctccagctgttaacaccgcagtattaactgcggtaaaatgaagcaaatatagacttgcagataaaatttcagttctgaccagtttagcaatcgcaatttgggccatttaccgacagaattctggttgtccttcaaataagaccgagtcaatgcgcgattcccgccgatttggatctgacacttcgtcaaatgaaccgagtcgtcaatcgtctgctgatctctctccaaaatatgcaggaaagtcatgctgacagggctttgggggaattcgggacgagcgagccgtttcctggtaaaataacttttccctaatgagtccaaagtgcattgacttggctaatttcacaatcccagttccaatgagcccaagaaagagtctagacgaatggtcaatacatgttgtagcacagccaattctcacctttaatcccacgcctggccagggataatcccaccaatctattctcacggtgtctccctgcattcctcgaatcggcaccccgccgtgtgactgtgaagctagtatgtacaaacgcttatatttatgtgtttgatgtttcttgctatatctcgagttctcccacgctttgttctttgtcatctcgtgtcatgcgtaaatagacgactcctttttttattcctcgtagattcctacacaacactccataaccatgcagccctcagatatatttgtgggttcaatcgatcaaggcaccacgagcaccagatttttgatcttcaaccgtgagggtgagccagtaacatcacatcaagtcgagttcagccaaatctacccgaatccggggtaagttgtagtccaacccaacaatcggatcaaaagcccagcctggacgcaaattaaccactactagaaggcatgaacacgacccattcgagatcataacttcagtagagacctgcatggaagaggcagtccagaagttcgaagcgcaaggtcacacccggagcagcatccaaagcatcggaataaccaaccagcgcgaaacaaccatagtctgggaccacgagactggcgagcctctgtacaatgccattgtatggacagatacacgctctcaggggattgtcgcggaattgaaacagaaaccagggcagagcagctccaagcactctgtggtctgccgttatcgacctactcgtcggctacaaagctaatctggatgttgagacatgtcccaagggtgaaggatgcatttgaccgcggtaccttggcgtttggtactgtcgatgcctggctggtataccatttgaacggtggcgtggctgccaacgtctttgtctcagattcgacaaacgcttcacggaccatgtttatgaacctggagacgttacggtatgatgaagtgcttctggacttttttgggatcagggggaatgtttatttgcctaggattgtgccctcgtctgatgcgacagcgtacggggctgttgcttctggggctttggcgcgggttccgattatgggctgtctgggggatcagtctgcggcgttggttgggcagaaagggttctcacctggaatggcgaagaatacgtatggcactgggtgctttcttttgtacaatgttggtgacaagctggtgttctcgaaacacgggttgctagctaccgtggcttaccactttggtggaaagcctgtatatgcgcttgagggcagcattgctgtcgctggatctgggatcaaatttttacagaataatttgaattttttccacgagtctaaagaggtcaatgaccttgcatactcggtggaagataatggcggatgtgtgtttgtcactgcgttcagtggacttttcgcaccttattggattgatgacgcgaaaggaaccatctgtgagtttctcattaccaggctgttatattatattaagtctgacagagtatgcagttggtatcacccagtacacccaaaagggccatgtcgcacgcgctaccttagaggcaacttgcttccagactaaagcaattctagacgcaatggagaaagacagcggccatacactctccgaactggctgtagatgggggtatgagtaactcagacctagcaatgcaggtaaatagcaaattctcttgcacgtgtgagtatttgaacaagaactaatctgattaaaatatagactcaagcagatgtgatatccatccccgtctaccgcccaaagatgcgtgagactacagctctcggtgcagccattgcagccggccttgctgttggactttggcacaactttgccgagctgcgagatatcaatcgttccggcggtacggtctttgagtcccaggtcccgcgacaagagagttctgctaagtttgcacaatgggaaagggctgtgcaaatgagtagaggctgggtgagatctgagagagccgagaaaggagaagccgctggcctgaaaaccgagacctacgcaccgatgaagaatcatgttctcccgcccaaggtagcacgaatctcagatagctccttaatctcacatgtggttaagagatctacatacactacgggtgtgaaagggagggcccatatctcggtcaaggagatcgacgtcccacctctacctgtgcagacggccctggggagtgtcttgggtgatttggatgatgcggacgaagaggatttgtttttggagctacggaaagtagagattttgcaaagactgaagaagctacggaagcgacagtcaaactgctactaattgtattcttattcctaatatggtcacgagtttattagatcacacatgaattaacataatgtacgaacaatatatacttcaacttgctacaaaatttcaaagcagaacatagattcggatctgagagatatcgcgctgtaattcaaagaatcaaccacagctcaagcaacacttgccttagcgatacgacactgtgcgcagcctattcaccctccttgaggaaaacgcaattcaactcggagccagggctaagtgtaacttcgaattgaagctctggattttcgactttattcttcccaccaaccggcagcgcaataatgcgctcataagcctgcaaaatccgaataacagtgtatcccatttcaatgatagcgaactgctgcccaatacaaatccgcggtcccccattaaacggaataaaatgccacggcctgggctgccagccggaaacccaccgttcaggaatccactccccgggattgaagtagttctccgatcccgggccgtcatatagatcagggtcccgctgcatcaacagcgtcgagtagatgacccgcgtgtttgcgcgcacacccacaggcgctagtccatccggcccaccgccacgtgggagcgtcgtatcgcgcagagagtggcgcacgttgaatggcacgacaggatataaacgcatggtctcgtgcagcactgcattgaggtacttcatttccttaagatcggtgtagctgggtttgtgggcggtggcgccgacgccaagtctgtcgcgaatctcgttgcgcagcttggcgaccacttctgggttgcgcgaaagctcgaagagacaaaaggatagtgtgccggctgttgtatcacgacctgcgaggagaatggcgacgagttggtcacggaggacgcggggatcgcgggtgaacctggctagggcgtcgagaaaggtctcgtgggttgaaagtttttcattaagttcgtcggctgaatgagcgaggacggtttggatgtatggctggatgaactcgtccatgatcttgaggtttttgcggaattcggtgcgtgacatggcgaaactaaagactctgttttgagattcagtgttagattaagctcagcgaggctccaatgacagacgatggtggcgtcgcacaggatcgagtatcactcacccgaaacggaagtactccgcttgacgctgttgaacatatttgaacgcttccgcaaaccgtgttgccggattatctagactgtctgtgccgttgccgagcaggtagtctgttgctgcatcgagggtgtatcggaagaagagtgacccgacgtccactaccttgctgctgctgggagagtcactaccgccgagaagtgggatgagtttctgaacatgtttctcgaagatttctgtgtcgacaatgcggtcacgcacaaacatgggacgaatgagctggcgggagcgagaccatagttccccgtctgtgataaagatgctgtcgccgaggaactccttccactcctgatggaaggactcacccttaccgtaatcagcgaactggcgggtgaggagtgccttgatattttctgggtccttggtgatgattgttcgggtggaaattccagcatcgagttcggccgtcttcacattttttaggccgcctgcttggctgatctttgcatcccagaattctataagaccgttgacttgattggcttggtagtcttggaacatgaagtcgagagcgtatgggagacggaactcaattttgggagctctgagaccgagacgggcgatttgtgctgaagcttggaatttgcggaatacgcagaatgcaacgaatagaccgagaagccatagcgaggcccgactgaatgtcgtcttctcaaggatgtcttcaatcatggtgccgctgaactggactgggctgagttgatgggtctgattttggtttgtgtcttcgaggggacacgttcagaataagagaaaaaagaactgatatgttgcataacatatgacagggacgaagtctattttatgaaggtgaacttgtcaaacagcgtggaccatacgggttgcaacgtttacgaatccgagaacacggccatcctctctttctagagaatataaatgaactcgtagtgtccaatgatgtatttttcctatatcccaaagaggtgtaggaggatggcccaaaggagcgatgcttgcgagccccgcgttatgtgacttcatgcttcgtttattgatccctattttgtctttgatattgccataagagaatgggctagacataaatccccaccaggtccattgtgatcccggttccatactgtataattatcgtagggacaccgacgaagatgccgtatgaagatacgactctcggtagacaagatttggcgacatagggagatcgacaacactttccaaggttgtggatatgtgggctgcagccacataaatatccctgcactgcataactaactatgttgtatgtgcacatgtccttcatgaaggcctaagtataagacgcctgatacgtcgggccttgagcattcgggctttaggctagagctatagaaagcctcgagacccctggctgtacaatatatatagaacatttggagtacggagtagttaagggaaaggagaccaatgatgtgcgtggttaaggggagctagtggacctattaagtcttcacgtgatctagtggattatcgctctttaactgttctctcacgggtacttgcctttagacaatttcccttctcggatgtcagttgaccgataagttctttgtctggatacttctcattgtgtatagaaaccatgaaacccattcacaacagctcaatggcttggtagtggaacaatggctattgtgaatatacaaactagtactagtgcatatgtagaactttagtacatagtcgcaaaatcaactccttatgtcttccgacagctcaaactttttcacctcttttatctgacccttcagataggattcaaaaataggagcaagggctcttctaactgataccaaatcgaccttgacggccctgtaggctgtggtacattgtactgccccacctcaccgctggccagccacagccacgtgatcaaacatccgttttggtcgcccgggtctttagcttcacttcaatctgcttgctaaagtcctgctttctctaccagaacctgttactggtctattaaactcacttgtgaccccaaccgctactacatcccgttttcatcgcatcttcattgttagtggcgccgataagatccgaaacgcctttatcgggtggcgcaagttcttttatcagcaaagctctctcttcgtgaatttctcaccaacctgtcacttttgcctaacttcacaatcgccttcgccatgatgcctcaaattgttctcgagacgcctcttgcgcaagcagtcgcaagcgtcatccagccgaaattggtggagatgggttggagtgatggccaagagtcaccactgatcgaatacatcgttctcatgctagtcaacggcaagaccgaggaacaaattgccactgaactttcaaaagatttccttggcctccaggaaggcgatactgcagccctcgagttttcgcaatggcttttcactcaagtcgagacgcttaaccaacaaattaatggggctgctccagcctcgaccgatgctaccatgggacagttgaacccctcggcaatggaattcgataactcagctcaaacgatgcccaatccgtttggagagaccaatggccaggatgccgagatgggcgaggccggaaacgagatgtgagtttttaccgtgcctttttgttaatgtttacaagatgctgacagtgctcctcaatagtcccacaggaccgaaagcgatgcgtaatggtagaggcggcaaaggaagaatgttgaaccaaatcaatcgaaacctggatcgtggctcggatgcagctctacatcgtgtgcgcggccaaggaaacgggcgcattggtcacaatggccggggtcaaatgagaggcgtcggccagcaaaatggtcgcggtggccgtgccatgggaatgccaggcggccccatgatgcagatgaccccggaaaaccagatgcagcttatgtcgatgttggaagaacaagcccggatgatgtctcaattcatgcctggcttcatgccacccgctgtaaaccctgcattccaaactggttcccacaatggctctcaaggtcgttcgctcttcaatcgggtcgaacgaggtggtcagcgtggaggaaagcgcagttacaacaagccgagagcggcagacggagcagacgtggatatggacagcacagcgggtggtgaacaagatgaaagcaaccccgacaatgtttgtcgcttcaaccaacgatgctcgcgccaggattgcccgttcgcccatcaatcacctgccgctcccgaaggtacttcaatcgatccttctgatacttgctcattcggtgcagcttgcaagaacaagaaatgcaccggacgccacccttcaccagcagtgcgatctgctcaccaggcagaggccatgtgtcggttcttccctcactgcaccaacccaacttgtcacttcaagcacccgagtatgccagtctgccgcaatggagccgactgcaagaccgaaggatgcaagtttacacatgtcgagaccgcctgcaagttcaatccctgcctgaacccgaagtgcacctacaagcacgccgagggtcagcgcggtgcttacgctgacaaggtgtggactccgcgctctgcagagcatgtcagcgagcgcaagtttgttacggatttggatggaccgcaagagttgatcaagccggagaccgaggagaacactcagagtcaggagctgaccgcgtgactccgcctgacatgacacccaatgaatgaagaaaaatcactgttcaaaaaccgaaaccaaaaaaaaaaaatagcacacatcccacaacagtctgtttccgaagcgaagaataccatgtacaacccgatcttgatcaacgaacgaggaatggctggagcgaagggcgttgatactctttatgcatttgcttttgtttcagatactattttctgtcctgttcatagattccccctctaaaagaataataccgaagcgaagacaaattcgcgaatgtctcatgaaccattgtgcgagctcgtaggattgttggaaaaagtgagctggagggctcttggttagttagggctcccgaggtccccgcgtagcttaagtaagaacggaagcttccgaggaccttcgggtttagcttcaattatccaaccaactgcgaaccgaatcttgccccgatcagcagatatgcggctaccatgtgtctctagagcactgagaccaagaccaaggcaattgactcatctcctcaatggtcaaaaatgcacatactcagccgtcgtgcttggcggtggcatcacaggactcacagccgcctggcaactcgcgcaagaccccatatgcaaatcgatcaccttgttcgagaaaacagaccggcttggtggttggatcgattctgaaacagttcctgtcgatggtggcaatgtcgtgttcgagtatgggccgcggactttaaggagctcgctcccagggtcactccctctgctttacctggtgagtattgctcgcgtgtgcatgctccgaattgcagtgccttgatatgctgaccccactgaaaggcgacaaatctaggcttgtacaaagacctcattgttacccctaacacgagccccgcggcccagaatcgctatatttactacccggaccgtctcgttcgtatgccggcgccgaagcctgaactttcttttgcggagaacttcgacagctttgtgaatactatgatggagccgctatttaacaaatttctttcagggatagtgaaggatgtcttcactccaccccgccacccaactgaatgggcggaagatgagtctgttgcggacttcatcggacgtcgttttggccccaaagttgcagataatatagtctccgctgtgtaccatgggatttatgctggtgatatcgatcaattgagtgctcaaacactgttggggagcgtccgcaaccttgagggaggtattgggggcatcggtgggttagtttctgggggagttacggcctctctcatctccaggtcgctctccaaaacgaaaactcggaatatggaagactttatggctatagacgccatttctgcaggccctgaattagtgcgccgtcagcatgatttagaggtcctcgcagctggagctagtactttcacctttaagaggggagttggccagcttactgaagcactggtcgcttcattgaaagcatccggcaaagtccgcttccaaatgaacaaggaaatcacaggtttgcgtgcattggcacgtgctcctgcgattgcggtatgtgaattattctgccttgctatgctatacccctaagcccccaaagccctgaaactgatgctgactgtcaatagatggaattctggtcagacaggcacagccaagtcaagacctttgagtatgactatgtcatctccaccattcctccagttgcacttgcgaagaccatgcggaaaaccgagcagttagaagccaagctgtaccctgtcggcttgaccccattactgctacgaagacaggactatgctgtgaccgtattagtcgtcaatctgtattacccaaatcccaaccttctacccgtggaggatggctttggatacctcataccgcgttcgattccctacgaacagaacccagaatgtggacttggcgtcatcttcgcctcgtcctctagtgtagggaacgggacagatccttcatcatctgaagtcaaccaagattccgcacctggaacgaaaatcaccgtcatgcttggtggacattactgggatggcttcgaagagtatccagaccacgacaccgcagtgaaaatggctcgcgacatgctcaagagacacatgaatatcactgataccccgactgttacacggagccgtctccagaaggatgctattccccagtacacagtcggccatctggatcgcatgtataagctctcggacacagttcgtaaagattaccagaagcggcttattctcgctggaaattggtataatggcgtgagtgtgggcgactgtgtcaagcagggtatcttatctgccacctacggcatcggaagaaaccggctcaactacgagcccagtccatggcgtccgtggacttcgtttgattataaacgctggaaacttgagggtggcattgtgatgtctcctgtccgtcttgttgactccaaaatctgatgctttgtgactagtccaagtggctttgctacttatacttggaaatgtacaccagagaaggccaaagcgatgtatagtaaatgtatcaatgaaacaatatatttctcgttgagagttggaaatcgacggcattggccggatatcaaatgttcaatttctaatgtctaatcactgccagctcatggtcggttaacctaaggctaaaagttgatccatttgtgaagtctgttaccatcctcggtcctgatcctaaatcagggtcaagggcaagagcacccatactcccgatcgagggaatggcagagagatgtgacagcatccgaaatctcccacagacgaagcgatgggtgattggaaggctgaacccagttctaatgtcccctgccatataggtagcgattctcacccacctacttccaaccacttgccacaatgatgcaggatagtttggtggctcccggggtgcttgcaggaagccctggtgaatgatatgcacattgacatatactcgacacatggatatgaaatattgaatctgatcttaccccgcgtctcagggttcgaaaaggcattcaggcattcccattgctgtcactaatcttcttgtcaccattggaatcaaagcccaatacatccagctgccggacaagttcttgaattttgatgactttctccaactgctcgggcaacagcgcctctcccagctgcttcttatcgcgaagatcccgcgcctggcgtagtttcttcttcagactgcgagctttcttctccttctcagcttcgagatcaatcggctcttcagcaggcttatcttctttaggtgcgggtgcggggacacgccagttgttcgactccgcgcccttgccctcagcggtgggcccggcttcgtcggtttccttcgcattccgcttggcctcgcggcgtttagcgttcttgttgctggcggcagtggtggcggcgactgccggtttcgctgcggtcctggtcttgtcgtcttcgctgctcaatgcttccgctcccggcaccccgccttttccgcgggttttccatgctgccgctgcccggtttttgtatagttcgacatcctcggggggcttgtagccggggcgcacgcggatctccttgcgtttagaaccgtcggcacggactgacgagggaatgtatcgttcgccggtctgggcatcggtggtgatgccggacctggcgacgttggaggccatggtgcggtttgtagggttgaactaatgaactagtaaaatatgagatgtccgatagcaccttgacagagtcaagctccaaggcaaagatcagtatccttgaagatccaaagagaaaaacaacgcgaacattgaaagttgagtgcggaaggccggaggctcggccaatcagcggaccggcaattcccgcagattcaaccttcgcaacttcaacctcacaacttcaactctcgctgcctcatactcctcttgaatcctttaatttaggtcgtgtgaaaacaccccaatctctcacaatggctggtgtatgtctatactccctcttccattgctcctatttgcattactacgtccagtactaattgacctctcgcatgacagttcgcaaacgttatctactcgcatgtctccctttcctaggtcctacgatcgcaactgaaacggtccaattgaaatctaaccgacgcattatttgctctgtttaggaccttcattcgcaagaacactgttctgctgaccactgcttttgccggtgccttcgcttttgagctgtgggttacatccaatcctcgagcatgttagatatgctgtacagcttaatacagaaaactaaccatgcaatgtcaaaacagtaccttcgacatcgcctccaacaaagtctgggacacctggaaccacggcgtatgtgaacctctttcccgatggaccgtctacaatacccgaggcgaggacccaagctgactatttctctcactttatagcgccaatggaaggacatcaagcaccgttatatggttaaggaggaggaagatgacgagtaaatggactcgaaggtgattgggtactttaccgcgggtaaaggggcatggaaaagccagtgaagctcgtgcctgttgtttctcatcccatatgtgggcttgtacgtgatagttggaaatctgtattttgactctcaatccctggttatacgtagaaaggccctctatggtttacacgttttatcgccttggtgtatcgtacatattagagtctacataccccatgctgttatttatcatccttgatggttataacaccaagaagaaagagatatataaatagatttcaaaagagatctaccaagacatctagaaagacattgaaatgttcttacatataacgttcctaggtaaggtcatcttcgaccaaatagatcagattgataaaagtttacatccttaagtacagaggccacagaagcagccaactgctctctcctttataccttcaagtcttcaaaccgtggcgtgtttttctgtacatatgtggtgataaggccgtagcgtggctgtggcgtttactgacggaccggttccatcgatgtcatagcgaaaaatgttaccttccggtctctacaaacaactctcaaattgatttcttcttgtatatttttggcctgttggaccttgagctttgtattcaaatttcaaacgcgtatatgacttcaccgtatctgtgctcatctgttcgcctgcattggtccacttcacccgttgctctcaccttccccccaccacaaagtatcatcgtgtgagcaacgtgaaccacacttgagaaccatatcgactcaatccggaccgatcccttgaatcctcacttgagaatttttttcccgcctgcatagccgcgaagaaaccacctgcgtcgcaccattaccacctcgagcgcattgtcgcgacaacggcgctctcccatcacttccttgtgatagcctgcgcgaccgctacggcaagcaagccacaacaacaaatcatgctcatgctcggggaatgtgagaagctgctcggtgatggtcttctccgtttacccaagaaacacaacttccgctatggccccgctgccgagaaggacctgctagagcttctcttccgatcgcttgtcggacacaacacagaactaatacaacacttgttcccagagggaactccggccggaccatggaaactagcggaggctcaaggtgcccgggaaggagctgagtacagtgaggcagcacggggcaagcgctgcggtcatatcttccgtgctggggaagccacataccgatgcgtgacatgtgccgcagatgatacgtgcgtgttgtgtagtcgatgcttcgattcctcggatcacactgggcatcaatatcagatttcgctttcctccggaaactgtggctgctgtgattgtggtgatgacgaagcatggcgccttccgctattttgcgccattcataccgatagtggtaataccaagggaaaggaacgggcgcagcgggcattgccttcggagcttgtcgcttcaattcgcttgactatatcccgtgtgctcgactacttctgtgatgttatctcttgctccccggagcaattgcggctgccaaagactgtcgagggcattaggcaggatgaggaggcctctagattgcgtccggactggtatggcgctggtgatgaagaggaggaagaacctgaatttgcggtcatgctgtggaatgacgagaagcatacaattcgcgatgtctctcaccaggtcacacgtgcttgccgtgaacgagatagcttcggccttgcacgggctcatgaaacgaacgatatgggccgcagtgtcataaagtattcgagggacctaaacagactcttaggggtttctaagataatcgaggagatcaaggttaccgtcacggtgcgctctgcgcgggatacttttcgcgagcaaatgtgcacaacaatagtcgagtggttggctgatattgctggctgcgaaatcctcgaggacaatgagattttcagacaaaccatctgcgaggaaatgcttatgccttggaaaaagggcagtgggggatataacgaagatatcggcatgaagggcattgacgatcatcagcggactgagaaccttccaggtcgcacgctgatgattaatttgcctaatcatggccaggtcctcttgaccgccgacgaagacgaagacgaagacgaagacgatatgcttgatgacgatgctatagacgaagatgaagacgaagactatgtcgaggcccacgatgctgatgatgaagatgacgacgagatggacatcgaactttctcgtgatcgggaagaagatgaagatatgatcttagcaggtgcagatgaggaacttgctctagcagagcgcattctcgccggactcactggcacccagccaccaccccgaccagcactgaatcaaaccgcagatcggtcctctaccgaacgaggcccgtccgcatctcaaagtcctggccctgaatccgcccctacaggttatatccccattcccaagactcctggttcgtaccgacaaaggccttcgaacacggatagtcactggcaagtccggccgcccattcccgccccgggcgaagaagtacctccgtatgaagacttgtggcagcgtactcgcctagactggctggtgctgtatgatttgaggctgtggaagaagacacgaacagacttgcgtgatctctacatcagcactgttgtcaatgttcctcagttcaagcgcattatgggtcttcgtttgtctgcgttgtacacggctctggctcaactgtacctcatcgcggatcgagaaccggaccactcgattgtcaacctttcattgcaacttctcacgaccccgtccatcactgaagaaattgtcgtgcgaggcaacttcctcacgaaggtgatgtctattctctacaccttcttaaccacgagacaagttggcgaaccacaatccgtcgaccccaacgccaccctggcgtttgatgccggctcagttacaaatagacgtctctaccacttcttccttgacctgcgataccttctccaatctgaatacgtacagcatcgtgtgcggaccgaggaacaataccttcctcaattccttgaccttgtcaagctgtcacagggtatttgccccaatgtccgcgctgttggtgaacacgttgaatatgaaacggatgcttggatcagtgcgtcaattctcatgcgggaaatcaaccgactttgccgccaattctgcgagtctttccgcgaccctgaaattgacaacgatgacaaccttctgagggcaattgagaccaccgccactacagcgattatccattcggctggtgtagaacgcaagcggttcgaccaggcagaaataaaagatgaattaagattcaagctactgccaccttttgactttgaggtcggcacctctggtcaagtgccctgccatcgggtggttgaattcgtggtggaacgtggatctatcagtttccaccatgccctccactacacattgtcgtggcttattgaatgcggacgagatataagtagcgagactatgcgtggcgtgctctttgacgctgccaatgcggcgaggagtgagattcatgccgctcggactgctaaccctagtagtatcgatgatatcttgcttgcccttgggcccgaggacttgctcctggctatgtttgactatccacttcgagtttgcgcttggctggcgcagatgaaggctggcatgtgggttcgaaatggtctcagtcttcggcatcagatgtcgcagtaccgtggagtctcttctcgtgattttgcatactacagagatatcttccttctccagactgccttagtcacatgtgattctagcagagttcttgcttctatagcacaccgctttggtatggttgagtggatggctcgaaattacatgccccgtcctggatacgaagatacccagattgtggacgtggcagaggaatttgttcatctactggtgattctcctgacggaccgaacatctctgactgccatagatgacagcattcatctcacccacgaaaacatcaaacgtgacatcgctcatgttttatgcttcaagccgctgtctttctctgacctctcgacccgccttagtgacaagcttctggactcagacatgttccaagatgtgttggaagacgtcgccaacttccgcccgcccgagggcttaagtgactctggtacttttgaattgaagcccgaatatctcgatcttattgatccatatagcgcacactatacaaagaaccaaagagacgaagcagagaatatctacaaggaatggatggcgaaaaagacaggaaagaatgcatctgacattgttttcgagccaaaacttcgacccatcagctctggcgtgttcttagatcttcctcgattcgccggaacaatgctgtttgcacagattgttcatcaatgtttggaatacgttatctctgcaaaagagtgtacaccaaccatcccatcgacgcgcgttgagacattccttcaagtgattctgcatcttgtccttgcagcggtattggaggatgattccgaggaaactgatatggtagaagaccattccaactcattcaactggaatgctttgtcaaagacccgagagatcaaggctggccacttgaccattgtcggtttattggaaagaatttccgtcacgagtgaattcactgcatctggccctaaaatccgacacatactcaaacgtctgtggcaaaagcgccctcgcacatattcatcggcaactgcgtctctcaaatttcccttcgaccggattgacaccaattctcctgcaattgatgcagataacgacaaggagatcaagaagaagcaagcgctagagaggcaagccaaggtgatggcgcagttccagcagcaacagcaacaattcttgaatagtcagggtaacatagattggggcgaagaagatttcagcgatctcgagtccgatgcagacgcaaccccagaaaagaagctatggaaataccctagcggaacatgtatcttgtgccaggaagagaccagcgattcgaggctctacggtacatttgccttggttcaagatagcacgattttgcgacagaccgatatcagggactccgatagaattcgcgaggtgctcagaacaccaacaagtttggacaggtctgctgaagaagtgcgaccattcggtgtatccggagagaaccatactaccatcaggcgtcttgactcttctggtggtgaagtcattagtgaaaagattggactgagtaaagggttcaacgcgaagagcactattcgtgggcctgtgactactggctgtgggcatataatgcattactcctgttttgagcagtacttcttggcgacacagcggcgacacacccagcaaattgcgcgtcatcatcccgagcacactaatctcaaggaatttgtttgtcctctttgcaaagctcttggaaatgcattcctcccaatcacctggaagggcaaagaagagtctccccttgttccattcagtccgtccgaatcattcgaccagtggattcaattaggcctcaagcatgccttgaaccaacagcaaaacctcacaatcctcatgcagaaggagaagatttatcctcaaccgtatactgacatctttatcgactacttgtctaagaccctggttcctccgcttgccaataatattgatcaactgagggcttcgtatttcccagcaactgcctctgcacaatacgtcacgccagcacgcatgccaatgccaggtgttttccctcccaccgaagacctctccccttccagcccacttcagcaggtgtcgagtccctcggacagccctatttcggaactgcttcagagctacaggcggcttaagaagacactcacaacaaaccatgtcaattcgatgttcaacaacactcctgaggcgaataacaatgacgatcttgtacatactgattctctaattcggagctttggtttcagcattgctgcagtcgagatcgcgcagcgtggtgtcgagtcagagcccggctcgaccttgctggacacaattccttcgctgacgcttacccatctgcgcgttctatccgagacagtgttgacgtatgctgccgttgggtgtcttaactcgtcgggaccatcaaaaagccatccaacaaatgaattccaggagatgcatcgccaaaagatttgccagctacttgtcgggcacccttgtttgaatggcacagctttgcttaatgatgtccgtaacatcgagcctctgctagctgtggacaccttcgtgttcttcgcagagtcatccttgtctctgctcccagtcctcgatattgatatcagacatcttgtgcgaatgtgcttcgtggctgagattgtgaaggtcgccgtcactttcattctttggccactgggattaaaggaggaactcgccacccaccccgaggacaatactatggctgctggtatatcggaagaacaattcagagtgaccaagcagttcttcgactcggtcgttactgaactgaaggcgaactctgtcggccgtgctgaaggctcatccttccccgctgagagtggctacgtcaaagatggagaggaaactgccaccccaggcatcattacggccgtccggcgacttgtgacgagctacggactagcattcctgcgcaaggcagttattcttcttcatgttcagcatggtgtcgagtttcccaacacaggtttcgccgacgtggagtcctctgagcttgagcgcctggccaaagcactccaactgccttcccttgatgagattctcatgtctgtcaagcccgcacgcaatacaaacagccccttcgatgcagtcatctcaggatggatcttccactggaacgcttcgcgctcaggcattcgcttcgaagaccaccgtctctggcccagtctgtcgcaccctgctatcttcgagcttgttggccttcctaagtacttcgatagcctgatcgaagaggcaaatcgtcgtcggtgccccaattctaagaaggagctcactgatcctagtatctgtttattctgcggagaaatattttgctcacaggcagtctgctgcatggtgaacaagcttggcggctgcaaccaacatcttcaaaagtaatcatacccgtcccactttgtttgtgagtactttccagctaaccagtcttccacaatagatgcggcaaaaacgttggtctttttatcaatattcgcaaatgcacggttctctacttgcacaacacgaacggatcctggcattacgcgccctacctcgaccgccacggcgaggttgaccccggtctccgccataaccgccagcttatcctcaaccagaagcgatacgaccggctactacgcgatgtatggctgtcacactcgattcctgcgactatcagccgcaagctagagtccgagattaacaccggaggctgggagactatttaatgagcataaaaatggggttttttctgcgattgctgatatgcgtgcgtttagattccttacctgcttacttttgatgttcgatggcgaatttgaaacgacggtgattgtgtgtttaaccgatttcttttcttttcttttctttttcactgtatatctgaaattcttctcatcaataggttcccttggtagttatgatttaaaaaataccaggctatgttcaactcaaatttcggttggatttgaatatagtaataccggttccatcgacacaggtaaaaaggtcgttgttttgctgcatatattccctgttataccccttctaatgagtcctcgacactcgcatttcctttctcgcttccccctcccccccgtaaatgactcctacgcatagcttctagttgagggagatgacgtttcttagatatatatatgtctattttgtctttcttctgcataaatatgtgtgcataattggctgtgagaatatattgatgcacaacaggctttctaactatatcctggatgcctgtcatcatcaatctagctcacttgtcgtataggattctaaatgtctaaatcaggattgactaactgagcgaatgccatcgctgctcctagaggactccgactagtgacatttagcagcgccatattgctcagcacgtttctttgaagggactagttgtgacaatgcttccaagactgacagtgcgccaaacgaggccaaacgcccgcccatattcacacatagttggcagtgtcacttagcagggaaatactatgaagtaaaaatacttacctaaattacctgcataactaatgaaaatgccctgagaacctcggaaagcttgaaaggttggccgatagtcttatcagtgccaagccggatctccacctcttaacatgagcctttctcaacttcattgcaacttgagctcgagaaacatgaataacgagcagtttcgccggctactagccgaccagtcatcatcaaaacctaaaccccagagcccaacgcctggtcgtgatgcatcgcgtggcggcgcaaccccgggcgggtcactggggtcgcgaatgcggtccagcattcccatgaccccgtatgtcgtttactttacagattgctatgattgcggaggaagctaacagctggaaatactacaggcgttcagtcactggtgtggactttgcccgtcagctcttcgaccaacgccgcgagggcgaccgaccttctaaacggttcaagtcctccgccgcgccgaagggtacctcgctaccgaccggatatcaggatcgtgcgaaattgcgcaatgcagaggacgaaggtcagagcaacacgggtctggaggcgcgcatcaaggcactagaggatatggttaagttgggacaaatcgaccaggctaccttcgacaaactacgtcgagaccttggagtcggaggtgacattgaaagcacacacatggtcaaaggactggatatggatttattgaaaaggatcagagctggcgaggacgtgtcacaagcggccgagaaacctgcgccgcctcccgaaaaagaagacgtagatgaggaactcgatcgtttgatggaagagcagggagctgaggagctccctgctgcacccaagcaacagaaagaaaagaagaagggaattatggcaccgccaccagctaggcccaagacccgcgatgaaatcctacgggaaatgaaggcaagccgtgctgctgctgccacgcctcccccgccaccggagtccatactcggctcgaaattcaagaaactgggcgatagaaagcccgagaagaagcgctttgtggagcatgatgagaccggccgtcgacgcgaagtgcttctcatcaccgatgcgcaaggaaacaccaagaggaagactaggtggcttgataagccgaccgaagtgcctgtacctactgagggggagctcatgatgcccgataaaagtctcaaacctctcggcatggaaattccagctgatattgccgcccgtgccgctgcacaagtcacacccgaggatgaggacgacgacatttttgccggtgtcggtgatgattacaatcctctcgctggactcgaagacgattcatcgtctgatgaagacgatgaagtggcagattcggctactcgcaaacccgaaaagggttctgtgggtgaagaggagaaggaacctgccgcgtctaaaacagcacttgcaaagcccaagaattactttgcgactgggacttcgactacaacagaagaggagcctatcgaccgttccaaccccctcaccaaagatccaaccattcttgcagccctcagacgagctgcagccctccggcagagctctccctcggcagagggcgaagcagacgggtctgatacagcgcttcgtcacaagcgtttcattgaagaggcacaccgtcgagacgctatggatgctgcagatatggatatgggattcggaggaagccgcaacgaagacggagcggaggaggacgatggtcccctgctcgactttgacgacgacgagcgaggcgggaaaaagagaaagcgtggccccaagaagaagaagggcgacaaagatagcgtcatagatgttatgcgtgttgtcgagagtcgcaagaaggaggcttcatgagtgtcattgctgcggatgccaggacatgggctctcccttgtctcctacatgtactttatactatgaaatcgacatttgaagctatttgataccctgctatgccatgccttttttacttagatactagaagtcatcttatcatgaaggccactcagtcacctccggcgtttacaaatcgttgtattaacccctttctaaacgctgttggatatcatccttagatgcaatcaaggcgatattcactctacatatctatataaaagtggtcagctgcttatctggccttagccttcaacgacgtaggttggtagggatggcattgggtagagacagtagagacatcttgctaacaaaatacctcgatgtcttttccagtacatatctcgttctgaaatattgtctataatggtcccgtgaaaacctgcgtcactatgtaataagtactgcgtgtatgggttaacgtattccgtcgatatcttcggcatcggacgtgtgccagccaccactaggttaatgcgtctatatgatctgggatttcggcttcgtcgtgtctcgcttgcccacaggacaagatagaatcagttctcccattgggagatacttgatcctttagactaagtcttggaattcgtcgtcacatcttcccaaacaggtcacctggggcatgttaacagggtggtgctttccctatttgagaatcctactttccctaaaacagaaggaccccagcttcagtccccagtttctgggtataaataccctcccctcccccccatctctcccatttttttcttttctcctacatccatcttccatccatcttctactccccccctggggtttggacgtttgttcatcactcaacttcataaccatcttttcaccatcactctcttttcttctgcgtctctgccacatcttgctgacccccagatgtctcgccacctggaccatgttgactggtgagttcctccttattatttgttccttcttatttgttccttccacatgttccttccacttgtatggcttgtcatacccgaggggtttcgcgtctcgcgttgtttatttctcttccctctttcccttttttatccatctctaccactccgtgatttcgtgtcatcggcttgtgtggttcaatgacttcatagaatcttggcatcatgtatgcctcctaaataactcatcatttatctaatatcgactctgattgatgtgttatttctgctcatgggacgaacgacctcacggtaatcatgcttcaggtgagaactccagcgttatatcaaccccacggttctttgctcgcaatgagtggaagacctcaccagtccattggctgacgcagggaaacttcttcttcctctgcctttatagattactgcatttttcgccgcctttgccgtatccagtttgcccacagcctatgacacaccatcgcggtcaacaccaaatataaaggccaatcttccatccgcaaactctacatccaggtgaggtctcctagcggacacaaatggaaaggaggttgaacgcacccgcaccagcctccgtagatagttagatgagattctgcgatgggatctcaccagcatttgctgacgcttgttggttttttaccaggcacctctatatccacagttaagttacgaaaatcgctatcagagctacttgatccttccgagcgtctcgatctcagctgtcgcccagcccagcaatgtctgccaattttagcgcggacaagtgaatctccagcgcggtatactccacactgcatattcaggtgaggttcctaagcggacaaaaagggaaaggaggttgagcacagacaccaaaggcaacctccatagatagttagatagggttctgcgatgggatctcaccagcatttgctgacgcttgttagtgtctcaccaggtacctcgatatcatcagcaaactcgaaaaagcctgccagcccacttcaacttcctgcatagagctggttcgtcttttatccaatcgactgggcgactcccaaatatgagcatgagtccactctaggttgttcccacgttgcctatctcatcatgcaacaagcatgcacatgatatttgctccaatgtgcattttgaggtgaggtctcccagcggatacaaatggaaatgagattgaatgcaaaacgccaacctccaaagatagttagattgagttcagcgatgggatctcaccagctttgctaacgcttgttcgacaggaatattaccagcccagatatgcaagacctgccaactcatttcagactgctatcgcgcgctgcgtcgctcgtaattgagcaaacacgcaaaaatattcgctttgatctgcgttttcaggtgagatctcccagcagacacaaacggaaaggaggttgaatgcaaccgcaccggcctccatagatagtcagatagagttctgcgatgggatctcaccagcatttgctgacgcttgttagtcttaactaggcatccccatatccgcgtcattcattcgggcttacttgcgactcaatgctcttcatcgatatttaggtaaggtccctgagcggaaaacatatggaaaggaggttgaatacaaacgggcaacctccaaaaccaaccttcttaattagctagaaagcgttttgcgatgatgggccttaccagcttttgctgatgcttgttggttttaaggtccataacttgaacttgcttaccactcggcggcctgtcaacacgacaatctgatttatcttgatcaagtaagattataaactgcaccttcgaagtcgtacagttggctgactactaccatatctgtttttgattgactcttccaactcattcggtgctcgaccagacaaaagcgttgagtctttccggctttatacgtgtcgtgctgctgggctacaatgctctagtggcgaatatttcttattattatttcaactagacgaagaccacagccagcatcgggaaaaagcaatagcagcagtgtctccattgcaatatacacggctaacatcactcagatcaggctttcagtcggctattcatctgagcaatgtcaatacagggcgacaaggtaatttgaaaccccctataggtcaacgagcgaattgtggaatatggtgaatggcctactggcaacattaaagttacaaaagtggagattcaatgtgaataaatcgatattgaacatcatacaacaaattgacttgaccttcaagaactaaacctgtaccaaaaaaggcagttagagatactcctattgacggcagatttgaggaagagagaaagtagcaatccactctgtagtccacggatttcaagtgaacaacaaaaagcaacatagagccgctatgggtgatctcgcacacgctctcagccatagggataaatgatttcactttcaggagattctcgctgccttcattcgtcttatttcagtcaacttcatatttacctaggtatctgggcattggattgctgttttcataactccagtttttattttctccccttatcccgacaacattatcagatcaacaccaattaatgcccctttcccacctgtgaacatcctcagcgaaaagcatggtaccgtggagtaagaagaaagaagaccaacgtgatagttagaccaatgaaataggcactccagcagattgcattcccgtcaaataccaggtatcgtataaccgactagctcacgaacaggacaacactttattctatatccccacatatatagaaaggctctccgtcgagagaatggatggagcttataacaccaccagcagtattgccaacgagcattctgcagttgacgaaccaaacgtaattccgaaactggttcacgccataggagctcagtaacccctgttttacgcactcgaagaaatgactggtaacacgtcaagagatatctgcaagttatcgcgaggcaaacttggtccgtgacccagaggaatgtaaagaggatttccactatttctggtggaatcctttggaaattgtcgactagtgggggtttctgctgggtcttctgttgatgggtggttcgtcgatgtcgttggaatatggatctcatctttgtgagtgggcgtgtatgattgtgcatattggaatatagcgaaatggtgagtgaaatggaaaatgaaattgacttcggtctcttttacgttgataggcgtcatcaactggaatagtacccatgggtttctaccagcttagggctatagtgctgttcatcctccttctcatttctctctattttcttttctgttactttctgactgctgaaacaatggatttagccgtcgttcagcactactttgcctttattagcatcacagtttcgactagagcctacgaatgatggcactatgcaaataaggtaagccaaccagtatctaggattagctgatccccaacggattgaccttagaaacgcttcaaaggcaaaccccacgaaagacaaatgtcaagatgcaaagttcaagcctctttgtctcaaacgaggccttaagggtgcacttgtgatgttaccaagggcaaatactgaagaatatgagacatctcatccatttgatatcaaaattccctttcttcgctcctctttcatcaccaccgaaaatcatttttgatcaaaaataagaattgcagagcatgaccagccatcaattgccgttgtttttgatcaaatattgagaatacttacttgctaagaggaaatttcacgtgggtttgatgttgaagcattgaatattctccctagtgtggtgtatctcagcgatggccaagagagatataaattctcacgtagttgacacaaggttgtgggtcctggtccgtgcgcatcccgacgtcccaacctgacttccgatctcgggacttccgacttatccagagaccattttggcgactgaatcgagcgaacatttgttctcatgctgataacacatccgtggagatacaggggaatcatggcggagaccgcgggtttatcaagacatcagcctcgcaaaccacgcccagaagagcggcaaaagcggccgcaattgacacatttcctgtgtctccctctggtaaacaccaagtcgctgctgcagctggaatcatcactcggggccttcataacagcccatgtcgatgaatctgggccagcttctcaatcgtcccccaagggccaaagggatacatcgcgcctgagtcttccaaggacagcttttcgtccactgggcacacttcaccttactcttggtgtgatgagtctcgccaataaagagagacttgatcaagctcttgcttttttcaaatccctcgacctggcagacctaatgagcgaagtaacgcgagccgccgctcactcacaacataaagacgcccttcaccaatcatcgcccttgacggtttccctcgagtcattacatgctttgcctcaaggaaaatcagcaaccgtattgcatgcttctccagtagatcatacaggccgtttgcttccattttgcgtaaagctacgtgacaaattcatcgaggctggcttcatccaaagtgagcccgacagaagatcggcaggaagacataaccccaccaatcgctccgtccaagacagccctcaggcctctgggtcagctaccttctctagtgacgtatctttacgccagctagaaagccaaacttcctctggtcccgcagacgtgtgcgaaagccggaacccattcataaatgtaataacacgaaaaccgaaacagcgaccacttcttctgcacgcgactcttgtcaataccatttatgtccgcggccggcagggtcagaacaagggtgcgaaaggaaaccgtccacccaaacgccttacatttgatgcccgcaatctgatctcacaatatcgtaattactaccctgatgacaatccaaatatcccacaaccagcacgtactggatcttccgaagacaaaagtgacccctatcgtacgaaatcttcaccgatccccgacagaaacattgtttcctccgagcataaaagccattcggccacttctcccccaccgtcgcggggctctcctttcatttgggcaaaggaaattcctctggataccatctgcatctgtgaaatgggcgctaggaaattacatcctggtgtcaacgacggcgatggtctgaatgaacgcctcggcgagaaatatacggtcgttgcagaacggaatctgaatttatgactgtcatcgccacccacataacatccttaaacattatcaattgggaatcatccttgtcaatagaaatcttgtctaagacctatatgtggaaagtaaaaaaaccaaattgtttaagctatttgttttccttctgtatcgctagtaatattaatgagtagactagatagatcccaagcctgcttgggttgcagatagtacatgtggttggggttgctcatcataaagtgagctggtccgagtgcagctcgacgtcggctaagcaacggggagaggctctatgacatcttcttggggcagtctgcaaagatccgacgggacattgaaagccagacagctagtacaacaaccctactcagccgagcgcggtgaattgcatatcgggctgggatgaaacgagaatatgagtgcagttgaaaatctacacggtcaagtacgaacaaatcatctcaaccgactcatgatggtctcctgtccccgttcaacagacaactccgcggctttagccttgatggcagtgagcatgctgcgctcgaaatcatcacgggtacgcagcacagcctcaacccatgaaagctgcaggtcccagtactcaagcttgaatgcttcataaacctccacgagcgcggggcccttttcagtggcaaggaggcgaacaagccaatcaaccagccgccacttctgcttgatagtaccctcaaatgagtcggggtagttttcaaagaacgcgaatacagtgagaacgtcgtccttgaacttgtctgtgaaggggtcgatatggcggcggaatttaacacccttgtttcgcaccgcagagaggtagcgcaccagcagctcgtccgagagttcctcgaccaggatctcggccaaagatgggtgcagcacggaggcgtagtccgccatgtagtcttcgaaggtggaagtgatacgcttcatggcaaattcgccgtaccagcgggacgtgaagaagtctggcaggacagtgtccagatcgacccagaagatcaggctcacgaactgcgccaggcagtgcgtgctcagatcaacatagccatcgcgcagtgcatccagctcgatggttgctgtggtgcccatgtacttgggtgtgaccatgggctcgaaatcggacttgaaccgcgtcaggtagccgaactggttgtcctcctcgttgtcgtcgatgcaggagatttgatcgttggctattccgatcagccagtcttgcaacagctgcacgccttcttggtctgcgccttctacttggtgcttcgcacattcctcgtccacgagtgcctgccatgcaatttgtcgggccttcaaggctcggaaaatggcatcaatgataccctctaccaggtctgcgcggtctgatgctcctgatgccataacttgttcgtggagcatgcgccacatgtcggccagtgtcttggtgcgaaagtgaccttctgcgttgttgtctagggcatctgagacacgctctaccagagactttttgtccgcgttgaaaatgcggtccatccattcttcgacggcattgatgatgacggcctgccactttcggactagttctggctcgcggtcgtcgagaatgttggcttggagatctgttggtgtccagcccagcttcttcattttcttgtagtacttgtcactccagtgaatgatactgagtaaattatcagccgggagctcggggtcgtcgatcatgctaagcaagaagtcatgcatcatccgatgatagatatcggtgtatgttttgaatatcttccatttcttcggtacaaggctctgcatgccttgcttgaccgtgaatagatcattgaagtaccaccggaacttcttttccagattgtctgggtctccaagaaagttttcgagggtctcttcgaattggctttgggcgtaaagctcgatagcctggatgaatttgtccttgtagccccgcacagtcttggggccaatgttcatggacttgaaacgacttgcgaggtccttgtggtctttctgggcctcttgcaacgctcgaactgtatcatcatttttctcctcgttcaagacaacaacagcaagtcgcacgaccatactcttgttgtctgcctgcaccaatggaatgaggttcatgcaagccgtgccaaggtgatcatcgaaccactcaataacagaatccaacccctcaaagtactctgtcagagtctcttcggagctctgatcctccgccttgcgaatctgatccatagcctcatcacggaaatcccttaaccgtgatatctgcatatgagcccgcagaatattaggctgattctccatatcgtcatcatcctctctgagcaaatcctccacttcctggatatccgcgccgaaattctccagtcctcgtttcatcatgagcgtagcatcgaaatgtctttgaatccgcgcaagttggtcaatctgcgcaaagtcctccacgctatgctgcgactcggcgcatagcttgtcgatgccttgtagctcgtcttttgtcttcgagacttgtcgctggccctcagtcaaagcaccaatgctacgttgtacggcctccagctggtctcgcagaccttcacgcaaccgggaatcaactgccgtcttcttccgcaggtattccgctttaagcccgctgatcttgtctagatcctccgggtgccgtaggaggtcttcgagtcgcggcagagcgaccgtggcatcaatgttactggcttgcgtcatggcctcggtatcaagtatatggtggtgtcgttgttccgggttgctcgaagctaggtcgaggggtgaggtgtcaacaatgcgggcatggggctttgcttgcgagaaggtagtacgcagcagtgcactatgatataaatccaggtactatcacgccggaaagagcgcagcccatagtctctcgtttcaaaatatgaaatactatatcagctatcacaggccgatagtcgtcgctgctgtcatcgggttctggcagaatacccacgtgacctaccgccttagaattggatttgcgggatcgcggccatctccatgtcggcaacatttcttcgccagatcacagggtcaattgcgcagcagatatcggctgcaaattctcaaatcaagactccggtatcatactagatccacttcgttccgttccacctattccgaatctgattccacgactccggacaaccaaaccaacctatcgaaagcacaaacatccgaatatcagatcctcttgatctgcacaatccaacatgtcctacttccgtatcacccttatgcgctccgcaattggactcccgcgccgctcaacagatgtcctcaaggcgcttggcttgaaaaagcgtatggcaacggtcttccacagcgtctcgccctccgtcgcgggtcaaatcatgaaagtcaaggaacttgtccatgtcgaggaatgccagtaccgcctcacgaagcaggaggtacatctcgagcgcaagcctgatcctggatattataccgaaaagagctgctctgagcagcggaaggagctcgggggtcagtgattgttttcattgagcttcgtgtggaatgggctgcttttcagactgcggttttcaccggtcttgaagattgcgatgcaagatccgactcttttgaaatccctttcgctctggtgcatgattgatcgatcacgtcctctttttttgctgttttggctttgcttgcatggagcgggttgctttttgttcgtttcttttgttcatgtatactacgtccacatctatcgggcgaatgttatatctgctaggtatccgaccgcctaaaacatttacacttcgtaagttaatctactacgaggagattattgtattatatgcatagtggaatctaacacttgaaataaatatgtgcaatttcaaaggacctggataataataacgccactgcaccagtagtttaggtaaggacagctagggggcaccaaaattatacactaggaacagtgcggataggctgagcgaagaagatacgaacaaggaaaaccgagttgttcacttaggctttgtacagggtgtccaagaagccttctgccagacggctgacgatactcttgtcgggaatgctgccagcgacaccgtatagagcagaggtatcgccacgctggaggatatatgatttgccctcgcgcttgcgctgctcggctttctcaagttccttgccgatgacttcacgcagatcagcaatgagctggtcgacagccttggcagttggaatagtgaaagcacagtgaatagccgggggagattgcagagcgttgaggtgccagcctttagcagacagatcatcggcgatgtcgtaaatgtcaatggcaccattcttgctgcggaatgcgaccacactgacgatggggtcaccgaggatctccatgtgcagtgagatggttggatcggtccgaacggctgtctcgaacttccgtgccgcgttgatgatatcggtgcagctgttgatgtatccgttttcgccgacgctcatcagactggcccaacaaccggcgatcagagcgccagggcgggagcccgccacggagggagaagcataaacaccgccggaccaatcggggtagatgaagtactggttgtttcggtatgatttgttgcggtagatcaagaccgagttgcccttgggcgcgaacccgtacttgtgggtgtcaacactgatgctagtcacgcctggttggcggaagtcaaagccaccttcttcctcgtagggcgaggggaatccggccttcttgaggtatgcaacgacgaaagatcccaagcagcagtcaacgtggagagggatcttgtacttggtagccagttgcgaaagagctgggatatcatcgacaatgccgtgggggaagttaggtgccgatccgacaagaaggacggtattgggattgattaaacggcgaacagcatgcacgtcgaccttgaactcgggctccgggcaagggactcggtgcagcttgatcttgaagtagttgcatgccttgataaatgccgcgtgtgctgtgtcgggaataatcctacgatgatcgatcagtcctgctggtcaatggtatagtatccccatgccaacttacatctcgggctcagtaacaccgcgctccaagaaagccttttgccgggcggccaagcaagccataagaatagactccgtaccaccgctagtggttacaccggcaccatccaagggggcattgaagagagcaagaacctagagcagacatcagccgaaaggctccaccaaatacgatactctcgatatagaatgtcatacataccatagcaaccacctcagcctccatcttccgaacaccagggaaaacatccggatgaatcggattcgcgacaccgaactgcccgaatgcttcagcctggagtttcaacagctccgcgcctccatggtaaacggcaccgctaacgcgaccatcttcccagcgtgtatgttcaagcccagccaacttatcaagttcagcgcggacctgctctggcgaccaaccctccttgggcagggtaagataccgtgtgacatccggcccagagtttaccagtttcgactcgagtttcgtgatagcagtgctcacttgcttgtcgacctgcccgctgacaccagggacacgcaggaagaggccatagcagaataggcggagcgagatgtagatgttgcggatgctgccgaagatgccgtagccgcggatggagtagaaggtcttgcgcgtataccgaaggatgaatagaataaatatgatgttgcgaatactggatcgagagcaaaatgcgtcagtggtgattgcgtttatgtctttcgttccttgattgcgcggggaacgggggattattcaacttacaggtcgatattcaaggcagagaggtgcgcgctggacacccggccgtagccaaccagcttgttctgcaaggcgactggcagcatagaagagctcattgttccccctatgaatagtctgcaataatgatgggtgagagtggcgatagggaggttccgagtagtacgttagtacgttttaactggttgagtctagcgggcctcggctgccacatgaagtaggcactcaacgttttgcatacaatgacgagacattggatattatagaggttgagtattgatagacttgaaattatagctattcacgcggtattataataatatctttatatctttacaagttagagtgacccttcatatcaagtcctggtctttctccactgacgtaatttgaactagtacggaatacgatgtaactaactaaatgcaaacagtctcaagttcggaataagttactgcctcttctgcgctaaatgtacaaagaaaggagaactctcttctcctaacacgaatgtgtttttgggtcccccaaaagaaaagaaagaagaaaaaaacagcaagacttttcagacccttatatggaaaaaatgtcaaaacaaatgaaaaagcatcaaatcatcaggtatcccgccacgcccgaattttgcccaagccactgtcagatggcatgatacaatatatgtattggtcaaaggaaatcgcctataccgcaagaccggcagcctgagccgcaaggagctccttctccttgacggcgaatgcggcctgctcctcggcgctcagatcaagaaggggcttgttctcgccggacttcaagttacggtggtaagcacggataatgctgtcggcatcatcgacggcaataggacggatatcagccatagccttaatcttggcagtgcactccttgtattgagcgtcagtcatctcaagcttgagctgctgggcacgcgacttgatggcgttccatccggtcaaacgagaggcgaaatggacgtagcgggtcatgccgaaatcggcagggttgataatctcgtaggtgctggggttgttgaggatggccttggcgtggataccagccttgtgggtgaaggcgcagaaaccggtgatgtagttgttgaaaggaatgttgacctcaacggcctcggcgacgaggtcctcaatctccttgagcttctcaagcttgtacttgcccttgacgtagtcgcggtcggcgaccatcatgcgggccatcaggccaccgagaggggtgataccgttacgctcgccgataccgagaacagaggtatcaatgtgagtggcaccggcctcgagggcacagaaggcattggcaatggcacaaccagtgtcattgtggaagtgagtctcgatgtcacagccaacaacaccgcgcagaacacggacgagctcgtaaacctggcggggggaagcgcagccaacggtgtcggcaataccaacacggttcacaccaaccttgtccacggcggagtagattgacagaaggtcaaccaggtcggaacggaaagagtcctcactggagaagcggatctcaatgcccttggacttgacgaactcgataacttcaatggcggcgttcttgatgtaggtcatgtccttgccgtgagagtgctcacggaggtaagaggaagtaccaataacaacatcactacggaaagtcagttcggagtcaagaaaataggacaaaatgacacgactcacactccatcaacaccggtctcgacagcaatacgggcatcatccatgtggcagcgaatgtgagtgagaatctgaacatgtcattagataccaataatcacgagatcagagcagaaccctaacataccttagccttcaggccaagcttgcaaatggcctcgcaatccgcacgggactgctcagaagcgcagggacttgtgagttcaatctatagagcaattttcgttaacctcagtccagggatataaagacttcgtctgtcccgcgactcacgtagtctacaccgaagtcatcgagagccttggcaatctcgatcttcttggcggtatcgaagaaggcgttggcgaactgctctccctcacgcaaggtagactcaataatcttaaagcgtgagacattgctaaggaaatcggtgacgccagcgtcgtgaccgtaggggttgcgagatgaggaggggtgtgggttttggcgagtctcaatgccaacaaaaccagtgtgatcgccatctaaataaagatcagtgggcaattctggtatattagctttcaattggcataccaggagcaatgacgccaggagcaccattgtcttgcccattgggctcggagtcggcaccagtacacatggtgcagatgggggagttgagtatgtagggtcgagattggaaaatatgaagccgggaagttcgggataattgagtaatttagaatgaagattgagatagaaaaattgagcagtatttaagatctttgtagtaagaaatcttaggaaaaagggaatgaagagtcataaattcatagcgccgaagtggtgggcggtgaatctgcgtaatggggggcacccccctcgctctcgggcggcaaaaaagaaaattttgattgtggagaggtgggggaagtacattttggaggagtatgataggatcagacagcctagcatggtctacgacctggtatgtacgatatattgcactatgactcaactgtctatcacttccaattcctcgcttcaccgaaatctgtgattgaaacagtatgtgtgatgcagtttacttcaatgcctcagaaccgacatcggaccttacctgtggggtctgactcataagcccagagctcaattcaactgacaatgcaattctcgacaaacatatgttgtatagagtgagtctataacagctatgtcattgctatcttcagggtgaggatccaagcatttgattctcattacagtatgtatccacgagtccgatgtggacgggatagtgatgtcatcatcatttccagtcttctagttggctcgagacccctgggcctgtgaaataatctgattacaaactcctaaacaaaggaagattcagttcatgctagctgcaagccccagatgacttgaaatcagtttacatacacctgcggtctttaaccaccagtacatcccaatatcagaagttaatacataaaaaagttcacttcacaaattaagccttcttgcctttttctgtcgtctagggaagatctctaagaaagatctaacaagactaccaaaacatcccactcccatcgagccaactggatcatatcattctcgatttctttcaaactctggccaagtgtgatagtcttcttcaatatcaccactcggttgtattaacattgtagctctatataatctgaccacaatttacattgattactatggaattggggttgtttcaatggtacaactaaatggttcctccagctcaacaagagtcttaacccctacggatgcaagattgagtttagtgcggctgttatagtgacaccaaagatcaatcatgcagtttggtgcatacaatctggaggtcattgtattggagtattgtattctaatccgggatacatttagtccaccaacggaaattgagagtattttgattctacatgttcctatagagaaagagtggatatcgataggggcaaatgattgcgtagatatggattcgtattcaaggcataaagagattgtatgtttttacaatattgatttcatacttacaaagtgttccattcgcaagaccaatcagatacatgcattatagaccttctgttcgaccgggttgaacgatatgcaacttgaagcaccagtgttttctagtcacatgtagtttccagcctccaagagacccaatagaaacaaaacgatcttctagtatacatcctaaagttgtggggtcgggaactttatgcacgacagaatccacatggaccgagaagattggaaaaaagatctaatcgattgcaataaaagaaatgatagtcagaaggcatttagaaggcatctggaatcaatctagaacattatctgcactaagggatggcgccattggtgcagagaaaggaggcgcgggagtgaattcaagcgttgtggttggccagcgctcaggccagctgtcgtcccaactagccatctccctctgaacaccattcttcctcttgtctctgactgtgtcatctctatccgcctttcagtcattggtatgtattctgatatcactagtttaaccttgtattaaacttgatccatcattcccgaaactgtgtcactaatctgttccacgcctcagccctcaagatgcgtttcacgtcgctcgtcaccctcctccctgccctggccatggcccaggagcaggttcccctcgcagaccgcttgcaggggtggttcaaccaggtcaagtcctacgtgccgacagcagcccccgttgattccccggtgatcgagaagctggccgcgaaggttaccgagaagagtgtcacccacctgtccctggacaactggaagtccgtccttaccccgggaccccaggcggaggattggctgatctacaccactggtggtaataagacctgcttcggtcgctgcggaactgccgataaggcattcaaggtgagttgatattttgcccccgacgcgtctttcgcccgtcacaaaactctaacatcttgttctcaattcctaggaatccgtcctgttgttctccgccgatcctacctcaccccacctcggatacttggactgtgaggccaaccaggttctgtgtgccgcctggtccgccagcgctccctccgtccagtactaccaggtccccaaggagccatctgttggcgaggagcgtgccccgactcctctccacaacatttacctgaacgccaccaccgtcacccccgagaccatctacgagatccactccaagaagacctacgagaaggcccccctctacgagggtgctctccaccctgttgacggctgggtcgctaagtaccagctcaacatccccatgggctacgttatctggggtctcggtgctgttcccagctggctgttcatgattggtatcagtttcttcagccgcaccatgatgtaagttggaattgatttgtgcttgtcatttgatatcagtctaacaccggaattaggagccgtcgcgcgggtcctactggaaacgcccctcgtgctgcagcccccgctggtagcgcaaactaaataacctcttttggtccctgttggtgttttgggttgtatataatcagtggtagtgtattgtgacgtgtccaatatactgcttgggttggtttgtgttctttgttgggcagtcatctgtcgggaatggagcctcttcgatcttaggcctttttctagctacctttttaatcaacgtatcctagctaattatctagtaggagattgtaacagattcaccgaatatattggtaactgtttgatgccaaccttgctttgcctctgtatccaaaacattatttaaacagtatatcccattacacagtacgtcccgaaaccgataaaataatagcgaacaagaatcctcaaccactacacccttccattgactttagattcttcccgcaattgcgtgtgtatttcctcctacgaatgtgacaaagtaatttcaggcatgtattcgcttgtaatttgaataaacattcagagatacgaagtgcataaattcttcgacatgctaatgccattgtaccaatttctaggtatctaaccacccgtcaagtcgcaggcctgtaagatatcccaaatgtgtcgatccatcttctctgacatccagttcctccatatcacgaagaacctgctcgatatattcgctgacgccgctaagtttcataataagtgcaatggcgcggtggacattgagaagccggggggatggcggatctaccgtgtgatggagacttagggtaagcgatcgggtgacgggaaacaagggatcacgtaagaaaggactgcgttctgtagagtcaatcctgtactgatgttgtatgccagtatgttcgaaatagatcttgaattcgccgaatagccggtggtagtctagcgttagagtgagggcgttcataggaccgtcaataagatggattattccgggatcgaatatgtccaagatccgaagagcacttttctttgaatcgctctaggcatatcagcaccgtcaaaataccaatcctaataatcagacataccaaatcggtttcaccagaagctaccgtcgtcagacaataagggaaaatttgggcaacctccaagtattgaaattgatcgctagactcatccttcaataggttcccgttatcatcagcacaaaattccgcattctcctcgaaacgctttctggctgctgctctatcgaatttgcgagacactacacagcggtggcggtcgcgtagaagacaagtctgctgccacgttccgatctgtgttgagttctgtagcgatgataacgatatgggcgttggctgtgatgtcttgactgatgatactctaactgcaattgcgaatgagcatatacttactagaggaccattatatatataagagattaacgaacggggaaggagaaaattttcaacgatatactcagcaaacatttctaggctctcgtgaagcttgtttatttgttctggctcccatgaagaaaatccttcgaagaattccaaggcgtgagtaatatcagaatcgaaggcatgtccttcatcatcaagcaggtccttatggatatacgagaggaagaaagtcacaaaggtatccggcgatttaacgtgctcgagagcagcctggataagtgacgcaggccgatagcccttccgaacggtcttctcggagccataatgccgtataagcctgatcactaggttccttgccgacttgtgctgttgtggtgttaatgataagggcattgagaagtctaaagccccctctatggagggatggtgacggtgagtcgccatcgctagaaccttgcgagccttagggtgaggcgaggaagtagaaagccaaagccagaaccggcgcaacgaagtcacacaattgagaatattgatacatcttatatagaatataaagacatccagtctctaataatgtgtttcatctgaaatctatcaaactaacgaagaaaaatgagcccaaggtgggcgcagtggaacaaaacgtgaagtctagggcggtcgagcttccctcaaatttcatttcgccaggccgagatctccaaccaccaactaaccaactcaaaatggccgcaccagtaccgctagatcgcataccccccacgacggccgcctatgtgattgcaacagccatcattgcaggcgtgaccggatatttcatcggccaaggctcctcaatcagcctcttcaaagaaaaggaagggtggccaaacagctacgatgtgaaggtccacagccattcctccgacgaggaggacgaatcagactctgaagaaggagagaccgacgaggaagatgagggcaacggcgaagaactgtcgagcttcaaggacaacagcgaggaggtgaagctggtgctcgtcgttcgcatggacctaggcatgaccaaaggtatgtgttcttcgcgcaacgtttcaattattcctcacatttgtgttgcaagcgcttacaatctcttccttctaggcaaaatcgccgctcaatgcggccacgctacccttgcttgctacaaatacttccttgaatacgcacctgactcgcctatcctcagaaaatgggagcgcggtggccaggccaagatcgcattgcaggttaagtccgaggatgagctgctggtgatgcaggctcaggctattagccttggactttgcgcgcgcgttattcaggatgctgggcgcactcaaattgcaagtggcagcaagaccgtgctgggaatcttgggacccaggagcgtggtggacggggtgacgggacacttgaagctgttgtaaatggttacacattatacatttgctcgtttggcatttagataggcaatgacgatcatgacctcgacgaccaggtttccgacgttaccgtatccatcgcgttgagcatgcgacacacggtgatacatcacatgcggacatagtcgacataattgtagcacgtttcctagataccctagtcgcgcaaaaaggggacctcctttgaatctaggagctttatagtggaattacgagttctatataagagatgttggcaagtcatggttattccctaacctcagcggccaacggccaatcggcaaagagatatgaaatatgacgccgtccgacaaccaagctatcaagccgagctcaccagtgggagctcaagacccgcgtcacaaggcgcagacaattattctgagatctgtcgaccggaaaccgtaaaggccatccacaaaaatgatggctccaagctcgtcgaaatgcccagctctcaaccaccacacagaaaccagtcagactggagtccatggacaggaaatctaggcacagatccggttttggtaaagaagaaaaagaggaagggaaaagcggaaaggctcttatttatgtccccaagtggggccggtaagattttatggcgctagcctagatagggatagtgcaatgtgatcacatcacgtgatccgattgcggttatcaggaatccaaacggcgttgcgctgatagccattagtacctttccatccctccttcacacaccgtcaaaatggcggacgctctatccatcgagcaaaacaacaagattcgagtggctcttggcctcaagccactcccagttcctggtgccggcccagaattcagagaagacgacgacagcgagtccggcgaggaagaagacccagccagcactctcgagtcgcgacaggcgaaaagttatgaaaattggaagaagatccaggacaccaccgaagcgaaacggaaacgagatgagaagaatgccgccatcaagcgggcgcgtgacattgcccaacgcaatatacaactccaaggatcgacactaggcgaggcgaatggcgacgaactcgataccaaagcctggctgtcacaatccaaaaagcgccaaaagaaaatcgagaaagaacgcgcccagagacttgccgaggaactcgaagagcgggagcgccttgcagaagccgagtacactgcagcggatttggctggtatcaaggtcggacactctgcgggtgctttcgatggtggtgaagatcacatcctgacgcttaaggacgcagcggtggatgatgaggaagaggacgatgagctccaaaacctcgatttggtcgagaaggaaagaaccgaagagaggctggagcttaagaagaaaaagcctgtctacgatcccacggcggagaaccagggtctcctttcacaatacgacgaggagatcgatggcaaaaagcgaaagagatttacactcgacgcccaaggctcaaccgaagaacgcgaagcaaagcgacaggaagtttccaaccagttgcggaagaacattatcagcctcgactttgaaccggaagtgccatcatccgattacatggacatcagcgaagtcaaaattaagaagcctaagaagaagaaggccaaagctacgaaacagaggactttgatggacgaggatgacgttgctccggttgcggattcgaccgatacacaaggatcttcagctatggatattgattcgaagggtggagtcccagtctctgctccccgcaagcccatcaacgaagatgtttctttcgtggatgacgatgaccttcaagcctctcttgcgttgcaacgacgagcagcattcaagaagcgcaagaagatcagccctgaggagcttgctaagcagcttcgagaagaggagactcagaccccgatggatattgaaaattcggataacgagggcgaggggcctggccttgttatcgacgaaacctcagaatttgtggcaaatctacacaagcctacacttctggagcaagaagaaaaacacgctacaaccgcggccaaagagcgcgaaagttccaacgcggagcccgaaggtgagggcgtcgagatcgatatggaccgttacggcgatatcgaagacgaagaggaacttgctgcgcgcatcgagcgcgatgaagtatctgcggcccagccaccacaacttaccggcaccggcctagaagaggaatcaactctagaccatggtcttgctgctactctatcaatgttgaaatcgcgcggtctcgtcaaagacaacgacagcaccagccaaaacgctctcatgcgtgatcgccagcgtttcttggccgacaagtcgaaccgcgagtccgaaatcgagcgacgcgcccgacagcagcgtgagcgggaccgtacctctggtaagcttgatcgcatgtcagcccgcgagcgcgaggagcacgcgcgctgggagaacaagcatcgtgaccagcaggaagcacgtcatatcgccgaggtattcaaccgcgaatacaagcccgacgtgcaactgcggtatgtggatgagttcggtcgcaacatgaaccagaaggaagcattcaagcaacttagtcaccagttccacggcaagggcagtggaaagatgaagaccgagaagcgcctcaagaagatcgacgaagagaagaagcgcgagtctatgagcacgctggacagcagccagaacaccggcatgaacactgctgtgggcactgctgcgcgcaagaatcgccaggctggggttcgcctgggctgatgctttttctttcttcccaatagccaaataccaatttacgatatccaaagtctagcccaaaagtccttccgaagctccgtagatccgcagatatatttagatagttatatttaggcctgatcagttagacgatcaggcaacgttgctgtagggagaagacggatgtcaccaagttcaatcttatgtatccgacttcgtacatatgggattgacatacaggtatttaacccagttgtccctatacaaccttagaaaataatcaaggtggtcggaatgtcagacacgaggaaaaatggagaattccttctccaactgtgaggggaaaaacggtgtagatccagacagatcagttcaccggagattcgacttgccgacaactgtagaaatgggctgatgttgctatacatgcgcgaatggatatatataaggaacgcacgaatgaatccagccaatgaatcatatcctaaaccctagatatcattacaattccctcatctctagcaactaaatcatagagaacaacaaatatttagccggaggattgctgcaaattccgattggttgtacctggtacctccacccaggcggagatgcataccaactcgcaggtacccgataccgctatcacatgagtcagggcaaaaacatcgggactacgtctccggtcctttatattccttcgctctcccgatccttcccttcctccttccaatcccaaatccaggaggtccaggtcttgccctttcgattttcttcgtctactctgccattatgctttccactttcagagtcgccagccggtcggctgccccccgtggggtcaacttgcgcaccgtcttgatcggagctagaaacgcatcggcctgggccaatgttccccagggtcctcctgtaagctttgtgcttgcaaccaccgtaatcgtggtttgaaaggccaattctaacgtagctcggttaataggacgccattctcggtatcaccgaagctttcaaggccgactccttcaaggagaagatcaacctcggtgtgggtgcctaccgtaagcctcgtcccgaacaatcgtgtcgcgtaatggattgctgacgagtcattccgctgttttaggtgacgacaagggcaagccttacgtcctgccctctgtccgtgccgctgaggacaaggtcgtcgcagaccgtatggacaaggagtacgctggcatcaccggtgttcccagtttcactacggccgccgcggagctcgcctacggcgctgactcctccgccatcaaggacaaccgcctcgtcatcactcagactatctccggcaccggtgccctgcgcattggcggtgctttcctccagcggttctaccccggcgcgaagaagatctacatccccaaccccagctgggctaaccacaaggctgtcttctccgactccggtctcgaggtcgcccagtacagctactacaacaaggacaccattggcctcgacttcgagggtctgattgccgatatcaaggccgcccccgagggcagcatcattctgctccacgcttgcgctcacaaccccaccggtgtcgaccctaccgaggcgcagtggcgtcagatcagcgatgtcatgaagcagaagggtcacttcgccttcttcgacatggcctaccagggctttgccagcggcaacgccgacaaggatgcctttgctccccgccacttcgtcaaggagggccacaacatcgctctttgccagagtttcgccaagaacatgggtctgtacggcgagcgtgtcggtgctttctccctcgtttgcgagaacgccgaggagaagaagcgtgtcgattcgcagatcaagatcctcattcgtcccttctactccaaccctcccgtccacggcgcccgtgtcgcctccaccattatgaatgaccctgctcttaacaagcagtggctcggtgaggtcgagggcatggctagccgcatcattgagatgcgcgctcttctccgcaccaaccttgagaagctcggcagcaagcacgactggtcccacatcaccagccaggtgagatctcaaaactcgatttcctaagtatgatccaaatgactaacatgatattccagatcggcatgttcgcttacactggcttgaagcccgagcagatggacacccttgctaaggaggtaagatttatacccgcatactttctctagtctgatcgctaacgactcccctagcactctgtctacgctaccaaggacggccgtatctccgtcgctggtatcaccaccggaaacgtcaagagactcgccgagtctatcttcaaggttactggttaaatgcaaaaccgcttgaaaagaaatcttgaaggatatacgataaaaaatgaatgttaggggagtgagagaaaccgggcctgggtttcgttttaaaatctcggtcctcttgtactgatatctaatgtctctgtttcaaattagcattgttcggctctgtccgtcttaacggggattttggattcgttttctacattgttcttttcttgttcttgtggaaaatactctgtaaactcatgtagtccattgctctctcatcggcattataactttggatttatgccctgattaggcttacagcccgtaatgaattatgtacctatgttgtagatgagaatcttgatatgctaactaaatggggttagtcctggtgaaatttagccctaagccctagttcgctcgatggggccgtgtcaccgcgtgacttatgtacatagtcaccccacaaaatatttgaacattctattgatagttcacccgttacttttttctcagccaatcaatttcttccgcatccataccacaatggccccaaaaagaaaaagatcgacgttaccatccaaactccgacgatacgattggcacggcatcgggaccctggtccgagcgcatcacggctagaccagcgaggcttatccacaatgtccactgagttggcggacgattggtcgactctagcagcaaaagcgcaggcacggatttctcaatacaaacctcagtagcatcagcaacacgcaaatatcctccccgtgtccctaaatgcatttattacctggctacctgaaggtgggcgtgaatctctggctagggacatcataagttcaaaatccgacaacgaactttatgatttctttagcaatttgcttacaggtcttgctacaccgagtgagtctaggaaatacttgtctagagtaacatcgagcactaatcaatcctcgggattagtgagagcacgttcaaagccaccatcagtcaccccctccccgcacgcaaaacgcgaggcgcatgttgaggctgtagcagccacgtttacccaaccagaaaagcgaacgtcacagttcaagaaactctgtctcaaacgcgatgataatcgttgcgtgatcactggcgaactagacattgaatactgggaggagcttaaccgcccagaggaaccctatttcggacggaccgaaggcgcgcatatcattccgttttgctatgcatcatgggaaagcgccgaggtattatacctgcagtgaataaatgattatatacaaatgaaatgataggatggcaagtggaacctgccggcaatgggaggttttataccgctgctttccccttgtcagacaagtccgagaaggaatcggtactgaaacaatcaatgatacctcaaatgggatgaccctacgcgcgaacatccatgacgagtttgggagatttaccatcgcattaaagccaactgtaagtagccaatggcacatcgtatgtattacggtctgatctcactgacatacaaatgcggcattaaaaccaagagaatgtgtacgaggtcaagactttcccgcgcttccccaaatgggatatttcagcactgcccacaagtagcaccatccacttgacgcaagccgatgatgcgcaggacgtagccctgcctaaggcagctctcttagactgccattaccgactttctgagattctaaatgcttcggggatgggacatgttattgatcgttatctcagagactgggaggacatcaagggcgaggccccaaaaaccctcgatgaggctgggcgaacaaatgtcaacgcatttctgcaggctggtttgtgggagcatgctcttgcttgaaatgacaatcctcgtgcctttttattcattaaagccaatgatagcttcccgcactcataggccatccatgtcgatgtagagatcacctttgtcaaggatagaggatgtgtgagtgactagctttacttgaccaaattttggatggaatagtacccttccaaggtctaaaactaggttgataggaccgatcttaactggcgtgggtcgagacatctcctgaataataacctcgtgggaagaaaaggatatagatatagtcttagatagacaaaaaaacacattgccgggcatgtcattaccatctctatataactatactttcagcgagatcaagtaccttaatctcttccctattccaagatttgttctaggagttgagtaactatctacaagacatggataaactaactaagccaaatgcgtacaaggactgtatgcagccaacgctccacagtgaatcaatacagcctagaccgcgccgatgagtctgtacgacacataatgtgctggcagcagcccccctccgccctacgttgcatctacacaccgttctttccacgtcgtctcactggttaataaatgaattgccaagactcaatgtactccagctatagagcttgtaacagtcatacccaccttgatgcaaatcgggcctgagttaagcaaggatctacaacgctgcggctaggctcattgagtagcttggacgacctcggatgtccacggatatgacacgcctttactcaatccaaactccaaagtggcttagaaagagcacctagcgtcatatgacggggcaatattagctacatgcctgggcagttagagtagtatatgaagaccgagaatgtggagtgtagtgttgctaaaatggtaggcagaggaacaaattcaaaaaggaaacatgtattaagaatctgtcagttttggggtaatatgcaatcgaagagaaattttgtccagtgaccccttccgcaacaccaagtgcgccataacttccaccttttagaaagccaaatgaatcagtatcctatcattccgctgacgcctatatccgagccagcgcccggaggtccgagagagggacagatgcagcctggaggtgcattagcggcagagtatgggtaccactccggggatggagaaggggtgacagatcggcccatgacacgggctaagatattagcaggtgagtgggcagagccttggcttgaattgagaagagcgaagcggaggaagacctcggaggttgtaacaatgattgaaatgacgatgaggacaatgataatccaagtttggtctagagtgaggttagctgaaaggttagggagcgaaaagagaaggtcagacatacgggaagtgcggttgtcggcaatcgagtcggacaagatttctgcaagatcgaggaatacgcgacatctctcgttgaggacctggatgcgtggtttgatctccaaatactcgcgcacggcgatgtagagcgggtaaagggttggctcgctctcccagaagaagttggggacgtcgagcatattagaagctagtggaaaatgttagtagggaataaatcttacctgcagcatagcgtgcaggacgacccaaaaagggggtaaggaacttacaaaggttgacctcgacacgactcttgaacaatcgacccaagatccggaagacttcttcgcgcttcatgcccagttggcctgaaactgcaagacgtgtggggacgtctttagcatccgccatctgtcgggccataacttcctcgaagaagcagagtttagtgctctgtgcaataccatggctaatagcgagcttgatcatgtggtcgccactgcgaagagtaatcatatcgttatagactcgcgggcgcgagatctcagtcgaatactcgaaatggaactcttctgtctcaaagtcctcctcatcaagaggcatcgtcgctagagggatagggataccagttgcagatgatgttgcaaatgccagatcggccagcaggtctttctcttgtcgctcggtgaagttccagaagacgacaacgccgtaactgaaaacgaacatttcagccacattgtataatgtccgagctggggcttgcggtgttgaagacgaggaggatgtaggggctggcagagagggacggtctcgaataaaagtgtgggtatcatccgtgctgtgtcttcggcggcgaagtgcaggttcaggcgaagattgcccagtcctttggttgctgtctggttgcgggagtggcgagatatgctgcaacccatcgacactagagccggagctggtagcttgttcatggtcatcggggaggtggccacgaatgtcttcactgacaccattcaagaattccgcatgatttccctcctgggaatcatgaacctcaggctgtggcggcgcttcataatggtgctcatcctctggacgattgtgtccaccaaccgagtgttcctccgtctcaagcatatattcatcatgatgatcacgaagttcattccgttcaatctcctcatccaacaaggattttccaccggggtatttcagcacagggctactccgcagacgatacccctcatggcccggcaaaagaggaagatgatacgcggtgtagagacaatcatcatagagctttgtccgcccaccatgctgctccttaacaaaagtagcaagcgatcccatcttatacgcctgggctgtacagtacgccgtaacacgcgcaagcttttccgtccggcgtgcctttggcaaccgctccgcataactcttcgcgcgctcaggagcaatacggcgtttcttcatgacttcttcctcatccaacaggggtgcaaaatcattatcaatgccgaaatcacccccaagtcgcttcgacacgagtaattggcgtctgatcctttccgggtcgatatttttctccttggctagacgcgcgacaagctcctcgtccacgaggtcggcaccgtcggagtcatcatcttcttcaatttcgccctcctccagttcgccggtgtcaggcagaagaaccagcttttcactgactttcgtcgttcgaggcgggagtcgcggttgcgcggcgagtcggcccatcgtgccgccggatcctgctgctgtgctgctgcctgagctagttatcaagcctccagatgcggaggcaagacggcgtgcccgtgaaattggtggtgggccgcgctgctgcattgaagggacgtcagaggcgtattggaggacgttgtcgacggtgatgaatcgggttgcgggcgagcggcgtcgtcgcggtatttggggctgttgctggtctctggaatctgtgacctgtattcaaaatatgtgttagttgagcttggttgtgcggttgatttgatagtcaatcctaccaagacagttgggctgcgctggctagtccctcgtcctcgggccggcggagtcattgtcaaacgagcttagaataagcgcttgagtatgtttgtttgtaactatttgccggcactttccaacatagaagagataattgaccgtgtatgtatcaattgctatgtctgatgctccgagccagcaagttcgaatggcctcgagactaaacccaactgggaatagttcattgagcgaccaaatgacgtctactcttacagtcacgtgcatctcattcactaggtcatcccgtgacactgccacgtgctacaccgctcaatggatcagggcccacagtacctcattgggactagcagattgcagatggcgttttggtcgatctggggtaaagtgaagatcggccggaagctggttctagtgcttgttgactacaaaatgaggtgagactgaggtattgatattttgtctatttgtgaggtctcattggtttccgaggtcaatgtggctcttgactaactgtttgtgctcattggtggcctagctatccgaaagcaaagtgctagaacatggaaggaaaattgggtaataataatatgaattgctatggtaacgatgagagatatgagagataaacataaaaacgccgtgctgtcggttcatttggcactcttccgagggcgaactggtcatgcagatgggatagaagagaataacgaaattagattacgaatgaaggccatcacgaagctgccgatcttcgtcccagatttccttcttcatgcgctgtagatggatgtgctgcttttgcagcttgtcgaggtcgacttggggtggattggggagcgctgcaagggagtcatgtaggttgcggtacttggtgtaaaagttcttgaatttctgagatttctcccgcagctgctgtctcagaatttcgtagctcattggtggagatgcactaccagtgctgccaccgctggaggagctcaccgctcggcgacgcttagcttccaagtttccagtaggacgtcccgcctggggcgcggacaattgatcagattcggccttgcgcttcaatgggttggtggtagtggaggtagccttcgcgatgccattggtctgtggagtagctctggcaggtttggctgcggcagaggctgcgcggcccactttgggtttggccagctgggtgatgagaggcgaagatgaagatgaaccggaggattgattctggctgtccgctcggctgcggttgctaccggtagagtcggacacgttggaaggaggggaggagccgagtggagacggcttctgcggtgaagtcgagggccgagaggggggacgcttggaacttgtaaccttggcagccggtttggatggttcaagcttaggtttcgatgtctcgggtttattcttgggcgccggagcaggagcagatgagactgggggagtatcggcggtgcgagccttggacggtgccttgattttcggtgctgggggcttcgaattggatggagtccgcttgtgttccttcggttgctgcttgggtgcaggcgcgggagcgggggcgggggcaggggaaatatcttgcatgtcggtatcatcatcttcgtccgaactgtggacgaattctgcggacttgatcttgctgtccactttgactggggccttcccaccagtcttcttcgtaacccgtccggtgagggtactgttggtattcttgggtttggtagaccgtttcgtcgggtccttgtcgcgggctttttgtgaggccgaagcagtcttgggagcaggcgcggatccctttgtagcgcggtcggtctcattgtccttgcccgagtcttccccattggctttggcggatggtgcggcaggtttctggggtgggccagtacgaaggttcaaacgcgaaaggcactttcccttgcctcgttcagcctttggaagaagtgtttgccaaagtttgtcggaccgagagatgcgcatgcgatcgaaggcagagatagaattctcaatggcctctttccggtcctcctcggtgtaattgaaaccaaacacatcaagatccttgtaaactttgtccttgagatcatatttctcggggttgattcggttcagaactccgaatttctcgccgagggcggtgcaatcgtcgacggtggtgcgggtttggcgggcaaggaacttggccgagacggcacggacagcgagaaggtgaatgaagggaaccttgagggcttcaagcctcgcacggtctttgttctccatcattggagcagatgttggagtcattgcaaaagaaggcgacttgggagcacccaagataggacttgcggtgagggaacgattggcagcagtcttgaggaaacgatctttctcgagctcgactttggtggtgggacctttgtagcctgacttgctgccccgaagagccttcagctcatctgggtgtgagatgatgtgagtcttcttagactcctttccccgctcatgggcattcaatttttcctccaaatctgccagcgcctgatcggtggccgcagtggcatttttagccttttccacctcgaggctatggctcaacaccccggtgaagtacagtgtctctttatcggataagctgtggtagatctcggatcggtgtgtttcggggtaggcatggaacatttgagatttgcctccgtagtgaagtgacgggtgttttcccagccggactcgagccggttgatccttccgtagactctggatcagatcatcgagggtgctctgcaccaaattcaatcgcatgatctggtttggcttgacagaaggatcaccggactcatctccgaggtggagagacagcccggtcgggggaatattcagactggtcgacattatgggagtggaggagaggtcagggtagggaggaagggagagggattcgagattgtgagcagggtcggatggcagcgtgagagctgcaggtcaggcggccaactgcacgagggaatgaggtaaaaccatacgccataagatcggcgttgaaaatatggaataagaggaatcaatgcagaatgtaggatgcaaatggtatagacagagaagtgaagaagaagaaagatgaggagaagggcagaaaggccaagagcaaggcgaagcgtcggagagtggggagagctgacggcgattccttgtaaaattacaggggattttcccgattttcctttttttttttctttttctctaattaattgtccatgtacgggtattctcctatgaggaagtacgaagtacgaatgtgcaaatgtgcttatgctagtatagtattgaagacttgaacatatcacactcctaatgctctatttcctccagtccactccgtttgatactgtatcggcctttgttctgactccaagtccaacttgtaaacttcttttcttcctttttccttctttcccctttgttctccgaaacccactacataagtacctgactacttacaactatcctactaatatatagtcaactccaatatatacacctaactactccgtagactcggcctacacctgtatacccaatcgtaccaagcgcagccgactactcgcaatctagacaattactattacaatacaattaccgtgaggagaaaaaaagcgatgctccatcacggggcttcccgagtccagtcttgtttaccgatgcgggtgcggtcgggtctcatttgacttccatatagattaaaggttcgtaactatgtttggttaaagaactctgacagcaggtctctctaacggcttgggttgactcaacagacagctgaatccaaaaccctgggagaaaaacattccattctttctccaaaaatcacccggggtactcatcatttccccgagatacctcaggaatgccacaacctggtttgcccctcgttcatatgcacccaggcacggatagccaacccgaaaggtcccagttcaagtgttaccattcaatgtttcgccctacatcggactagtgggcttgctacggacgcttactcctttcgataggctaacgggaaacggggccaattcctcgtaccacatgttatcgggctcctattctggctacggggtacttttagcctttcttgcattcgactatgagatgacccgggcccgaacggcgcaaatcaccatagagtggtcgtctccatggccatccccaggctatagactgaatgccacctggtgttcctcttccttattggatcttgagtttcacagctgcatggaaggtccatttatgcatcccaatggagcaatggagagcaagccattaggctccggggtgtatattgtactccgtattacgcccttcttattttttattccttttttattctttatccttttactctttctgttcctttgcagtttcgcccccatgttgggtgctggactggtcaattccagtcgatcccaatcaacccaaattaaataacagtggcaaacccaaataagatcaagttacagttacattgcgagtccagtataagcagtgtacacaaatgacctgcatggcctactcaacctgggcaagtgtaattcttcataagccggagaggggaataccgtggatcccttgcgccgtccggcttattctccaattgtctagtctgagacaaggggaaatattagccattgcccattgtttgccttgctcgatctgcgcagatccgtgcagaactgtcggctccgaaaatcctcttcgtcatcgtttctacctcgtattcaatggctcaggacattatcaaactttgaagttgataatcagattaaggactctatgaatttggaataattctacaaatctccaatatccaattctgcaccccaaattaacccatcccacaacgacatcgtcaaaacttccgcagcctcatcccaacagcctccatgattgcctcactaccaacaccccccgcgatcgcaacagggtcctataggatcgccgccgtgatcggcgccgacgataacgccctaacaaaaccccaagatctgaccgcgatagccgcaatcgccgttcgcgctatgaaccctaccaagccactgaccgtcgatggcaaaatggacacgatgtctccgagttggcagataccattacgcaggtaatcgctctaggtgctgtaggatataatctcgaagatatagacgcgactggcgtgctgcgatcggtaaatgaggctacggcataggttggggttgttgtttattgtccaggcggcaggaaggctgggtttcctgactttgttccataaggggtatagttaatgtgacgatgaatttgcaagtggcatttctgagggtgaacaagattcgggggttgggcgttgcaaggtttagtattgggccggagttgtggcgaactgctatgaagacgtttactgagcgggccgaggtgtcggccttgtgagtacatacgctgttcttgcctacacaaatacatggatatattacgtttgactcataggttaggcattcaaacgtcatgcagcctaaaataaaccgtcgagctttaattcaatataacatttgaagtcattaattgattccgagtacagttgctgtcggcatcggcgatcctgaaccatcaggtccggctacaaatcccattggtgcagatattcccataacagcagtgttcgtcgacaacgcaaggcccattgtcctcgctacaagacggccacctatcatctgtcgatcggcatttgttggcagcgcagtagcccgagcagcattgattgttcggggtgccgaactcacaggatgctagtattaattagtggtacgttcaaagttgtgattggatgtgatatctcaattcttacagtagactcccgcgcaagtgggtgttgggacacaggttgtgacagtcgttgtagagggtgagacaaaggttgctgttgtgcatgtctcggtgagaacgcaagccggagcactaccacatcctcctgctgaacaagctgctgcttctattttgagggaaggtgtggttagtagggtgggggcgaatgtaggtgtttgttgggatacatacggctcagggcgaggtgagcataggtaagaataagagccttccagagatgcatctttctggcgtagatatttaggtcttagttatgcgagaacagagtgtgctcagttgattagagaaattattcagtaagaccttctgtcggtgtctatatatacatcacacaccaagacatacaaatgcgtcaactctagggcaaaccgtggaacacacggccagatgacctgatacgaagccatctacatcagttgatagtaatgttccaagctcagaccattagccactaccccagactttctatttctgccacggtcgatgtttctcctaacgtcatatcaatacgagggtcaacacgaggacttcattaaactcatattcaattggccttcatgtgagacactattcatcattcaagactatgcttccttcggttttgttcctgttttcctttttatagcaacgtgatgactatgatgttgctgggtaaaattgccgactagtggaatcatgcttggaattgatcacatttttatctcgtatcaaatcatgaattaataataaatctcaaaacacatgttagtatatggcacatgacaccaagcctaaaattagcccgtatagagaagaaataaatggcaagaattcttcactatacgactcgccaacctctatcgaatgaacgagttggtgcgacttgagactctgtcccgttcgaagctgccagaaatatgttcaaatcttcaaatcatcctctgggtcactcactccaaagtaacggacatattccgttgattttagcgtttacatcaccgctggatctgatgagaagcttcaacatcggcattcaaccgcaagccactgcacaattgatcaatcctccagataacaggttgcatccttctgtttgagccctccattcaagaattgtcccgagggtactctcatggcctgcgagaagcgcactaaccgcgggatgggttggtggggtccaggtttgctcgcccacacagtcgttcaattgagccccgtgattcaggagcagacttacaacagcatcatttccagcgctcacggctatgctcaggggtgtctctctttcgaaatcagatggaagcttaggtgaaatgcgatatggggacccaggggccggaagaggggtccgaggtagaggcccaaaaaacctaggtggaaagcggcgaatcggttctggtttttttaactggcatggatgggacatccacataggccccccagtagagcacgcctctttcattttccttggcaacacatttaagccttggctttccgagcacttcacattttgttgatacagacgggcaagaagaaggtcgtataggtgatagttcacctgtagtaggtgcgagagatccacctcggatttcagattcgtacttatcaagagtaacaactcattgggtagttcaagtaacgaaaccatagggttgaaagtgatgtgcgatatcaaagagtacgaattagaaaggacgtcagtccactagcgcggggctgtgtacgggctaacacaagaactaaaaactgccaacagcgcacagcgcaggtgcgtgatcgattcagaattggagcggccccaaatgttgatatcattcctgttgatttacttcaaatagtgcaagacgatgttttagaaccttcgaagtaacctcgacttataaagatagacacaccacatttctgcaccgccatggtggttgctattacactagattactggcctggtatcgagtgacaggcttttctaagaagtcagtgtctcctcatcctagaatattatagttcagatccgcgttctacaactttagcggagaatatgtaccttttatatgggaaacgcatacaaaagatacctcgaaactgtatggtttctaacccctccaggcctttgggaattggggtcgcgaaggcgagctaggcttttcgactaaatcccaactccgctctgccatcaatcgggaccaaagtttgacattcggttctcatggctccccctaatccagagtgagtcctcgaacatgtgcatctacatacgacaattagcggaggcattaaagtcaacatacgaattctgtaatcggcgaagctaacacagatcaccagcttccccgcagtccgcgcctgcattttcgatatggacgggcttctcatcaactccgaagacgtaatcagtctatccacaaaccaactgctggaaaggtatggaaggcctccgttgactccgtcgattcgagcccagctcatgggtgtcgcagactcgacaaatggcgacatattccacaactgggccaaattacctatctcccgcgagcaattcgcccgtgaatcaagcgagggcatgcgactacgtttcccggattgcaggccgttgcctggcgcggagaagattctatagaatctaagccgtgcacggagtgcttcgtctagggacatgattcagctggctttggcttccagcactaagacccagagttatgagttgaaaactgcggggccagaatcgaaaacactgttgagcttctttcggtcggacaggagagtcttgggtgatgatccacgcatgcgacggggtcgagggaagccagcgcccgacatttatttgctcgcgttgcagtctttgaactcgggaatagactctgaggaaaaggctatcctgcccaacgaatgtttagtcttcgaagatagcatcgctggtgcagaggctggaagacgcgctggtatgagagttgtttgggtaccgcatccagatgtggcggtcgagtatcagccgatgcataaagtcatcctggctgggagatcaggaagattgaagttcggaaatgactggcagctaggagagattgatgatggctgggcagaaattatacctagtctggaagactttgattacgagaagtacggccttgatgtggcatctcgaatatcttaatggaacagttccaattcaatttgatacctgtgtaacggcaagaatctgttcccgcatataaaaagaagaagaagataaaagaaagaaaagcgttcattaacgggcccaaaaagcaacgatctcgtcaatgtctttcatcgtcaagctcttcaaaagtcgatgctccttggtgatctcattcctcaggcgacaagcaaatattaaggcaatagaagctttttgcatcttgcccattgccgccaacaagtttccctggaggaaagtagtgagagcgatctcattcttatgcgcattcggatcaatcgaccaaattcccaacgcgtcgttgatcatagcactaaaaagcaatttggtagcctccggggaatctgatatagctgctgatgtatcctaagaatgtggggataaatcgctgcacaggcaggctatctgcaaccatacagcctgttgccagaggatttgggttgtggtagctctggcacgatactggtcgctgttgattaggaagttcatcgagttttctgggcctccagccaatctagctacttgccatggaagattatttgtaatgtaggatattagattaaagatcttactaaatcctgaaccctaaaatagcggtctcgctaattagatacgggtcaacaatgatagatgtgttttcttggctcggtgttgatttctattgggcagacccagtccatcggcagttgcaacgagggctcgcaaacaccaaagtatatcgttatgcagtggccgcaatatatcgatccgcggaaaggaattttgggagcagttgtgggcagtcggtctcaaggagatggatcatgacagaatcatctctcacccgcaagtcacccgcttcgtggtcaactccatgcaccgaacaggtcttctccggcagtctcaatatgtgggattcgttgaggccgacgacgacaaggcgacaggtcttgctgccatggatttaggtttgaagaatgggtattagccaatgacgataaatgatgccgtgatacgggaaacgcagccaaagtcgacaaccatgccaatcaatcggccagggtaacatcaacattaattgaaactggggtaagaggaggacaggaatgagagggaagtgacaagtaagaagtcaaagatggacgttgcactccacggcattcgttatatctttcttatgcataggtttgtgggtttacaggctctacggaatagaggaatgggatgattccatactcttcagtaatcagcctctgctgtatgctcttttggatggatggcgcgcagggtctttttcacttgattggggcctttgtgcctgaaatttgcctggcacaaaagtaaggatacctgaattaccattacctacctgcgaatatgaagcctttggtaccatacaaatttaaatatctcaactttcttaggtggtttactggctctctccgttatgcgtaaagtaacttaaattaactctactattaccaataatagatatggttcaattccaaaacagtcatttaaatgctatatgatagagagaaaccaattgattagatacgaccggtattttatcataattgtagtgaaattgtagacttaaaattctttattgctggtaatcgtagtagtagtggtagataccatttgaattacttcatggtgatagttttatatttatatatgacggagagagctagtaaacgactggaaaagtcaagataggtaaatttgcatggtgccaaatgctctatgagacagctggcgtagatggaccctaactcggcagactcaagtccttgctttggctgaataaagcgcctgaatcgtcatatgtaactagatttactgcaacaggttggttatgctttgattggttgacgattgattgattggtgcaaattctaacaaataaccgaagtagccagatgaggcacagctcatgtttgcacggatgcttggtctataagctttttaactgactgagtcatacccgccagaatctttgtcatgagctcagccgtcatttcatcgcgaagcacgattcgcatgacttcgatgtcttctccatgtgctccccatccgcgaattgtataatctggaacaggtcaatggaagatacatcaatggagaaccggaagcgactgactcggaatagagaatttcaaatcgtgcattgcatcactgatatccgatagctgcaggttaggatactgtcgtcgggcctgatcactaagtctaaacaccgcaattgggagcacatgagtaacagcttgatcacttcccttacagagcgtataacctccacctgctttttgttgccgatgagcatcgcttaagcaataaaaataccccgtctcctccaagagtacactcaaacgacgagcccgatcgagcaggctctgggtcctatcctggtaccctgcaagccccaatcgaaggaagttataatattggccagcgataggtgcaccggatctcgagaagcttaaggagaaatcgctatgggttccccggagataagaagattcgactaggaggccttgtggaatctgtgatttttcgcgccaaagtatccatcctaccgcgagaggtgccatgccaaatttatgtcctgatgcattgatagattggactcgagaaagacgaaaatccctatcaggaacatattgtattagctagtaataatcgacggagggtagatgtatgtttaccagacgaagttcgtgttggtggaagtaaaaggtaaaatgaagccaccacttgcagcatcaatgtggatagggatattatttcctgttcgaagctcgtacgcgtccagtacgtttgcaacttgctgaactaaatcacaatgtccagtgtaggtagatcccatagtcaagaagacaccgactaagaaaagtcagcactagaacgatcaatgagactggcggcatatacttgtattttcatctaagcgatcttccaatccctcgatgtccagtgaatatccacttctctcactgacaggtatgatcctggcctcgacgtcaaaataaaacgcaaatttattgacgcaaacatgcgcatttgccccaattataacattgggacgagggtacaagtgattggggtgattcagctgccattctcgtttcatagcaaggccgccgaggaggacggattcagaagagcctgtcgttgctgcaccgaaaaagccatttggggcgttccaaagatttgcaagtatagagaggcatttttctcgatagctagttggaataaagtgtcttagatgatcttctcctgagtcataatcaggccaacaagaattactcactctgctaaggacggatactcatgaatgcatgcttggtttcgtagaccaccagagatcatgagatcgatagcagtctcatcgaacttggtagttgtgaatcttcatacatcagcaattctttcagttcaaaattgatcgttcagcaacttacctcccaagatcatgcgatggaggtatgtctgcggccataacattttctgcaaatgctctcacagtttcaaccgagagtcctctatcaggcatatagcccttagagggcagaggagtaggagatctattggaaggcatgttgagtagttgaaatgccaatatgtagtataaggttgcgtcgaatcaatgctgagtgtagtatccagacaaggggtactgcttcggtaacttatagaaacgtagattatagtcagatttcagagacttcatgacatctcccttaaaaaattagttcaaaaatattgctcccaatacatgacgcagatctcagaatctttgccacaatgctaacccccttaaaagctgtactacacaccatgtaatcactgtgtacaatatcatatgcaggttcgaaatattacgttatcacattaaacgtagatgacatcaatcttcttcgaggatgttagatcgcgcaacaatgataaaagatcgatttggagatcgatctagagatcgatttagactaacgccatttttagcgtgagatatgatcaggggttgtgtgtggaggggtctatttgtcatccaattacctcttacggtgatttgctgggtttgttttgccgggtgttggacagaccacatgagctttacaaagatcataagcgctgtggacataaaatcgagtttgaaatgacttaccatcgatggcgcaagagctgcatagactgcgggtcaacaagcgatgttcgaatggatactagaaacttggtacttggactgtatcatgctatttgcacccccagttacaatcagggaactttctaggtaattctgagaggcattgggcacacgagatgccttgtgcggataaatttcccgcaaactccttaatggtggatagccacaccatggaagaagaaggctaccctgcaaaggtcagtgaacgtaattgtaagtctatcatcccctgtatgaggtgattgaagcgtttgattgtgatctactcaagccgggcgacgatctcccgtatgagcactcgtgagcgtggcccacgacagatgacttccgcatctaggccatgatcgagacaattaaccaagagcgaacaaacgagagcaatcactggtattggttgatcagcaacctggaagttgtgttgttcacggatgcagattgcacagtttcagtgcattggataacttctccactgcaaggacgacgagacaattcttcctgaaagggcttcatacatgtctttgcgtcatggtagtcgcgtaataagtatttttcatccatatttgtcaagttcgaaccagatgctaagtgtacatgtagacagccaagaaacgaacgccttgctattgatcatagagacgtcatacaataagagataggcaagtgcttgaagatcaagatcgattcaatggtcggtgtaaagctatataaagtcgaggttcagactgggaaaccatcaattcaatcaatgtgctgctattgttgatgatctttcactatgactatcgcggaccacctctacaagacagatgatgagactcctcatgctttcgcaacttgccatcaagccaaactcagtgtggacaaatctcaatcaaatgacaaagtggcaacaatactagctgcttggtctgtgctgttgcgagactactatgcaccaaacactcccactttcagtcaccttcgaccgaaacacgaagggccttatgagaagaacaaggcctcatctggagatcttcagagtcaatgcctgtcaatttcaacgaacggtgatctcagtaccagacagttgaaagatgcagcgtcacaggctattgccgccgatgattggggagacttcactaccacgaaacagaagacggctgttttggagtttcccaatgaccaaacgaaaccccctctcgtggattttgagcagctcaaggtatggaaactcactggatattccaaatctccattagcgtgaatcagagctaataggtagtccaggttgaagtgctgctagtcattagtactcaacaagacagcatatcagcaaatgtgtacatcaacagctccaaaagaccagagctcaaaccatgcgccatactgaaaagcctccagattatacacaaaaccctgacgagcgagtcgtgcatcaaagttgataaaataatcaccatcacgccattcgacattgaaaggctgcacgagattaacacaatgaaccccgaacaaaatgctcgtccagaatgtctccataccctcatcactagacaatgctcccgacaaccagcaagcattgcactggaatcaatcacgcaaaagattacatacgaagaactgggaaaacaatctgctactatctggaaggttctgatgcacaaaggcatcttaccaggagaaacggttggactctgcatgaacagatcagtttcaacaatcatcatcatgatcggaatattgagagcaggtgctgcgtacaatccgatagacccgtcgtctcccctggaaagaatctcccaagttatcaaaagcgccaatgttcaacatctggtgaccgatgaaatgctgcttgataggttcaaggacgtcggggcaaatctgatcatcacaccgaaggattttgagaatgcagagtgcccagaagactggcaggaagacaccaacatcgatgcttcaaattcagcctatgtcatcttcacttctggcagtacgggagttccgaagggcgtcatccatggccacggatcagtctctcttagcctttcggaatgtattgaaaagctccagattgattcttctaccaggttcatgcaatccgcaagtcttgcattcgatgctagtatactggaagtttttgccccgctagctgctggtggatgtctctgtatgatttcacaggaagagcgcaacgctgacctggaatcaacgatgcataagctccaagtgtcgcatgcctggctcaccccatcaatggtaccacacatccagccagagagcctcccaacccttcgaagccttggactcggaggtgaggccccaaccgctgaaattttatcgacatggggcgagaaagtccagttgaataacatgtacggtaccaccgaatctggagtctgggatacagtgaaaactggagtaaagccgggtgacaacccgaaaaatgttggacggagcatcggcaatgttgcatgctggatcacagatccttccaatgtgcacaaattgatgcctgtcggtgcagaaggagaactgttgatacaaagtccatatctgacacttggatatctcaacgactctgatcgtcaggccaaagccttcgtgacaccctcatccctggaatgggcttccctaatgcctccaatcaaaggatcccaggtatatcgaacgggagatctggcgaaatacgatgaaaatggcgaggtgattctcttaggtcgccaaagcggctacgtcaaaatccgaggtttgcgtgtggacttgggagagattgagaatgcaataaattcatgcattaaggttggccgctctgcggtggttctatacggacgtgaagccatggataccgaaattgtggcgttcattgaaacatgcgatgaccagaaaatccaactagctgaaacgctttctgggcaactgtctgaatctctacctcaatatatgattcccactgcttatgtgcaagtcgatacattgccgcagacgttatcgaagaagatcgaccgacagaaactccgaattcatctatcacagatgagccagaaagactttcggagatgtcgcagtggtagctcgtcggacgaagaattttccgaaatcccagaacaggagaatatggccaacgaaatcagcaatatcattgcagacataatcgagaagaaagacgaggagtttgcatcttctatccggggtcggaacttttcccttgcaagagctggcctcacatccatgcaattggtgacactcctgaacgtgattcggaagcgatatgagaagaaactcaacatagaaacattggctaaagatgtgactgtttgcaacattgcagacagtctcacgggaagaatcaatatgagacccaaaaacagtccccctaggaatctgattgccgatctcgcaaacttgaactcaaagcttgacttcatccagactcgcttagcgactgtctttctgacatctatcaccggatttctcggcagccagatcttgcgggctctgctggaatgtcctgaaatcggatgtgtgattggacttgttcgtgccaaggatgaaaaagaggcacgcagaaaggtccaggagtatggcgagcttggtcagtggtggcagccaagctatcaggatcgccttgaagtctggacaggagacttaagcagaccgaagcttggattggaggagaccaaatgggacagtctgttaacaacacacccaacaaaacgagttgactgcatcatacacaatggcgctcgagtgaattggatggattgctatgaggatctcgagaaggtcaacgtccaaagcaccattgaaatcctcgccggtctttctaaaatgaattatccctgcagattgatctacgtctcgggtggatacatgccaacagagacagagagtcataccgaaatcgccagaaagctctccgaggcatcagggtatgatcagacaaagttcatgtcccagttgctgttggccgagtacaacagatacttggatcgggaaaccatcaaaagccaaaaagctcagactgtgataccaggattcattgtcgggaccaagaaagaaggaatcgcgcaaccagaggatttcttttggcgactggccttcactattacacgtctgaaagccgtcagtgacaaactcgattatctgacggttgcgggagtggatcaagtatcccgtctcattacagatgcattcttgcagccggaaagatatacctccgaagcgattcattgcaccgatggagtagaattctccacattctgcgattctctcagcaagctgacgggatgtccaatcgataggatggaacatgacaaatggatgagactactgcaagccgatgtcgaagaagcagactttgatcatccgttcaccccggtgctgaaatggtttcaggagaacacttggcagtttatggtcgcgcaagacgatatcccgaagaattgttatttcgacaagaacgaaatcgtcctggccctggagagcagcttgagatatttgttggatatcggatatttctcacacgatgaggacaaggaaaatcgattgtcgagagcccctatcttcagccgatccaggtcctgacagattcatttgatcgtagatagcactccgaattctgccttatttgggccaatttgattttttctgccatgtattctgccacgtattctgcctacttctagtttatatagtaaaaagacatgcattttgatcagaaaaaatcatgtattttgcctgattcctgtaggatataaccccttgatggatgaaatatttgatgataaagcagttgatgacgaagttactgatggtgaagtagttgaggaagttgatggtgaagtagttgaggaagttgacgataaacagttgatacaagatatggcaggtgtgacttaattttgttaggagctcatgtacgaactgcgggtacctgctgtcttggctactaactataatatgcaatttgatacaaaagcggtgtacagattagcaggtactcaaacaaattaggaaggcggtactgagcaacagggaaggtgcgagcaacaattccccggtaagacctggctcttgacaccctccaggtggccgaaagacttgctcaccagataaagggttcgacgacatggtggtttcaaaaggttgggagacgagaaagaaaagacagagcaaagaattgggcttaagttcttagatacaaacaatgatagtatttatataacagccactcccacattccccgtccccaaagatagtggctctaccacaaaatgccaccatcaagatggggaaaaaaacgagagaaaatgaaatcgagagagggttcatactcacactagtctcaacaccaatttccttatggccgtccaatagcacaaacgcaacaattatcaaaacccccaccgatgaagccacgcccccatccattcctctttgatagcaccacatttcgttaaaggtaaccgctttttgctcaaagtagtatccataacaacagatctctgattggcggatatcagcccctggaagaaaccaaggagacttataccacagacaggtgatcgggagctttcatgactgcgagccttgtcttctaaaatgtctacccacttctgcagggtaacaacctcgagaggctctgtcgagcgaagtcgctgggccagaaatggcacgaactccgtgaaaggtacatgggttgggttcacgatgtgatagtatctggattggggagcctcatgattctctccactaggagcattcgagtcacacacaaggtcggacaaagcctcagcggcaatgtcaaccggcacccaatcaatctgattcgcagagccaagactatctggaatacacccaagctctaccgagctggctaggaatgttgggaaccagtcgcgtcgtggccatggcttttctgcactctgctctttggtcggtccggaaatctgcccaaggcggcagattgtagttggtagattggtcagctcagttgctcggtcgagcagtaagcttgcaatgagtttgctttgtccataacctgtctgggcaagttctgcaaaggcgagcttggcttccggaatgggttccgacttttgccaatttttgacagtagccaccgaggagagaaagatgatctgcactttgtgcttggcatcacaggcaaatttaatcagattactgacacctttgatgtttgtctcgaaggatttgagtgggaggttgaagtttacttcccattggcaatgaaggatatccgttacgtctgccgaaagatcatgatatatgagatctggaattccaaagtgaggctctgtcagatttgcctccagctgctcacactgagcagtactgccttctcttaggactgtttgaatggttggctttgagtcgggggactttctgttgacgcaggttacctttctcacatgtttctggcgcaacagagcctccaaggtgtgtgacccaatgaaaccagttgtcccggttagaagaacatgtttactggttggcctgttccgcttggtcgttgtggcagtagtggcagttgggatttcgtgtgaatatctagacctcagatcagaatatattcccatcttgaagagaaccgcaacctgcctctgccatatttcatcaaaattttcttgatccccggactcgcgaaataatgctgaaaggcttcgcaaaatagaccttccaagaagaagtagcgttggattgccatatatggtgcctatctcgaccttccaccccacatcaatgtcatgcacaggctgagatgcaagtttgttgttgattgcagccgtgagcatctgcgcttgctttgagtccattccagcagcaaatatgtcatcatctgtacccaagtgagatgtatttggtaaaatcttcgctatgaggtgggcaagaccagaagtcagagactcttcggatgtcaaatcgaggtccaagtcatctaggttaggttgactagggatagagtgagagctatatagctcatcaatctcggtcttgtattgctcaaggcttttgttgcggtaaattgttccttttggtgttcgaacaaatggcttctctttattggcaataagaatcatggactcgtggatatgactgtcacggctgctgtttgaattttccatatccaaggcgtctttcacactattcttcaccttggatgaaagatttgagtaagagggttctgccttgtttataccttccacctcgagtattaggcccggatagcgttgcttgtttccgatcacaagagcggctttaataccgggaatacatcctaatcggctctcgataccaactggattcatcttttctccagtagagaaaacaatgatgtcgtcaatcctgaacccgtatttccacaagtctggttcagtcggatgctttttgaagacatctttggtgtgccattcgttcagctcaggaaaattgtgaaacacactttgatacgactcaagggaacggtcacgacgaatgaccatttcaaattcaggttcgtttccttctgcctctgggtctattggtcgccaatgaatgccattcaagggatggaaatgaaaataattccaatgtgacggatcattcgaatattgaatgaaagatccacattcagtggaacccagtccattgaagagttgtgtcttggtgacaaccgtgtcccctttcttttgactgatggaacctacagacatggtactgtcagctaccgttcatcccttagggtcaaaacagcctaccccctccagtgaatatccatttgaacttggatgcagagttcattgcctctagattttctgatagctcttcaacaattgacggtggaagaagagctccatctaattgagaatctctcatcgcaatttgaagcatcaatatactcggtggccggtggtagtatccaaacatcaacgtggttccggagaacagaagataggagcttagcgcgaatcccgcaacatgaaacaggggaaatgcgacatagacggttctggcatctgacattatctctagctggcacttccttcctttcgggtcttgttgagagattagtcgctgggcgtcggaagcagccaatgaagaatggctgattggcacgagtctgggtattccagttgagccggaagtatgcagaatcttgtcaaagtcagattatgtactagaactgaatcctttccacgggtcttaccactgctggagtcgagcgaagtgtggcccatgacccatcatatggatagttctttatctgcttgggtcctcgaagtagttccactaagtcctgaatttgaaaagtctgtatgcttcttgtttttgagatctcatctaccgtggaagaaaatgtcgactcaaagaccatgaccgggctattcgacagttctaggagatatcgagccattgagatgctgaccctaggagaaatcaagagggcctgatctcacttataagctttgacattacttggaagtagtgaacgcggattgcgtacctgtttccccatcttcgtggcaacgagagagatcaaaagatgtctgaggtcacttggtcctaaatagctgataacactgttagaatcgaggctatatttagattctttagaagtagcgatacgtacgcaatgactgttgagccgttgggcttgatagcgaggttatcaagttgccaggataaatagtttatcgcattgaacagaccaaggtacgaaacaataacctcatgtggctgattgggctctgcatgctctggctgaataagttgttgaatagctgtcttgtcaggactatttgaagctgttgcctcaatatagttgagcaaaattcgactacctactcgactctcaccgtgttgggtggtacattgcttatttgatgcagccatgactttgataattcacaatcagagtgagaatgataatgataaccgagttactatttggattttgtgactgacatgcttctgtttatagacacgctgctgatcaggtcacgtaatttgtattcttggaaaaagcaagacttatagccaccatgtcataagccatgtgatctttttgactcgatgtcttgtaagaaatcttacatcatttgtccaacttgatcacagactcgatcgtcgcctatctacgatggcgaacattaaattcaaatgcgcatgcgcatacgtatgaacacgaaatagtggggtttaaatatgcatcgtaaccccatgctacaaacttctatgtagtagaagtgagtcatggcgcaagtgtgtacgaggatactccgtcagactgcatctaagcttgaaccttagaaatggttccgtggctgcttctataaaagaccagtggggcttgcaagaatcctgatgatatctcttcaattattctactcacgaagaatacacacattagaacaacaacttacttttttaagatggaacacacactgtgcgtctttcgtggatctagtgacggcaagttgatccaagatgtgatcaaaagatcatttggctccaatgatgttcttcttgaaatgacacacgcaagtatatgcgggacagatgatttgtttttgcactcgccccaagtgctcggccatgagggtgtgggtgttgtcagagagaaaggccccaatgtgacgtcagtcaatgttggtgaccgtgttggcgttggttatatccagtacgtgtgtgggcaatgtgacaattgtacttcaggtaatttcttgtgttttctgtaaagcccgagaagttccgcagttgaccttgttatccaggctggaaccaatattgcttccgcagacaacgctatggggccgatgaccctcaacaaggttgtcttgggaaccaagttatttgggacgcaagtggcctcatttgcatcccggagaaatgcagctctgccaatgccgctgcactcatgtgcggtggagccactgcttggacagtcttgacacgctataatattcggcgcgagcagcgcgtgggtattattggaatcggtggcatgggccaccttgcagtaaagctatctgcagccttggggtaccatacagttgttttttctcgctcgaattccaagaggaatgattgcatggcgttcggggccaaagagttccacgttcttcccaaggatactgcggtgaaggaatggtacacgactgacactgcaaaatcattttatgggaaagtcaagcctgtggatcatttactcctgtgcagcaatacatcggaggactttgccatgctcatgaatttggtggctactcacggtactatctatcccttgacagtgagtcttgattctgttccagtgccattactggccatgatcgacaacgcaaccagcatacaaggatccctgacggcatcaacggaagacatctccagcttgttggagttttgcgctgcgaatgatattcacccgatggccgaaggccagttcctagaccaaactggtgttgaagctgcttttcatgcgttgaaggaaggatcggtgcgatacaagactgttttggagaaaaagtcagtttgctagatagcttggaactaagtatacattttattttagtctaccgtcctcgcgacccgttccgatttattacaaatttgtattttatattgccaatgaagatttcatttctcagtccgacgccgtccggtgggccgatctaaccaatctatgttgattgtttaactagtcttgcccctggaatagactctggaagtatctttcaactgaagttggtatgacttcgggaaagaggtcattgtgcagttgaccaggaggtctccaaaatctaccttgaccttgcacatatcgtaacaaaatccaaaaatcaacagggaaggtgcttcctttctgaagcttttccggcgcggacgatggattttcgagtatccttttggcctggtcgacggaagttgggttgattcgagctggctttctggagtaatgacgcagaagtcgagtgatctcgttgtaagagatataatcacttcggaatcccaagatcttattctcggatctctctggatggttgatgctggccacgaggtatttggcgacatcttcacaagaggagtagtccatttttgcgtctgggtctcccacgcactgaacctcatagccatcattcgtgatagcctgatctttttccaaccagggacaaagaattaactcgtcctgtacatcaaagagctcagcgcacccaataacggtgtaggtcatatggccactctgaattgcggggtgcttgattgcattgtcaaggcatctcatttttgcggcccagatctaatcaaaatgttagagcatgaagccagaagacgatggaacttaagagacttaccggatgtagatatgccccttcgccttcaaaccaaggtatctggtgcattccgaattcgctcggatagaatcgtcgaactcctgccattgcagccgcgtcttgaataacaccttgtttgttgataacttcacaaccaagcgtgctaacaacaacactgacatcatggctggccatgatctctgcaaggtcattgctagtgacgatgttgaggtctactctcttttcgatggtattcgcctcatcaaagtcgccgacttgaaaatcagaatttggagaaacgaaggcaaggactttcatttgtgcctctttcgactcattcagtgctttcaaaacgtgtcttccgatctggccattggctccaaacaaagcaacagtgtagaatggggtaatcatgatgaatagatcctggaggttgactttgttggccgatagaagagtgatttagtagttgatatttcggtaaggtagaggtaacagtgttgaagtacttttttgattctacttgaatagatctgaaaagggagtgtacgtgtattaggggtagtacgaacgccatgtatgtgatggtggcaaaccctcttcggacattcctgcaagtgaggcgagcccaatttcttggataatatgcattgaacggtgagaaaccgttgataccatcaaataatttgccgatctctgtcatatatttggaataccaagctctcaaatggggtatgacatactaggagctgaccttgcggcaagcgcgcactatcgacttccgaaatgatgtggagaccagcgctgtgtgcatagcaggtttctcgcctatgtatgatctatactaaatcgagaattggtatctccccctatgtctgggcgttatctgctgacgatcccgttcatagcagaatactctatctgctgaaacacttacatggttttcttttaccattgtccaatgtggtctgtgtctgggttttgagcttgcttaggtccggtatctgacggtcattgttcacatacataggattgatagggcgagggcaaaatggcaatctttgatttcgttggcaatttggctatactgttgactcgaaagactagtacataattgatttaatgagactcaatgcgcacacaagtagaaacctccaagctatcctgtctaaagttagcatattattcattcaacaacgacgatagtttactcacaggctctcctgtgggctcaaagctgtctatcagtgtgttttcatatactagatatggattaccaaaagacttgttcgccatcactttgatatcgaatgagtcctgttcctgttgcatcttgatgactttctgacttgtggtggattgtacgtattccaagtagtcgggaacaccgggagagatcacattgtcggcaatgacagtagtgccaggaccaatgagaccgagctcttcgcagagcttcaagtcattgacatactcccgcttagcatggtcaatgaagaaaccatcaacagcaccggtagagtattcttgtcgcagttttcggagagattctcgacaaggaccgacgcggatttcgacaatgtcgtccaactcggccagctcaacaagcgcactggatatagcagcaaatttagagcttgcctcaaggctcaaatactttcgaccgctggtcttctttagggcagcaccaaaaagcaaagttgagtagcccacgtagccgcctatttcgaccatgagatcaggctggagtttgggaatcaagtcttgagccacaattttccctttttcgatgccgacattcatcagaaagtcggttgttcgaccatactcatcaattgcagccaggattctctcggggtttccctgcatctcgtgatatccagcatgagcgcggataaattccagaagtcgctcttctcggccatcgtcatgctgatgagttgtcagaaagaacgtccagtcctgaagaaaatgaaaaatgagaacatacgaatataacctgctcaggcttatagaaagaaattggatcttttgtcatgatggtttgttctcaaaaattcggtttggtgtgtttgtgagataggtgaagaccggccaggcgagtcgaaggataatttgagacgtgctgcaggaattatatattgttctcctgcgagctggacactgcttactagtgacttcgatcaagtttcaattatctcacgtcatgtgttgtgacagtcttcattttcccgctctgacatcttgcccatactacttggccttgatttggtttttgtgatttgaaatttccaattgcatctgggaaacggtccttgcaagatgcaaggatagcatatcttgtggctcctcaagtacgttcatttgatggcgaggaaagtgcgcactctatcaagtccgccaatcgagatcgaggagtaaatatgttgcaaagtgcaggttccactcacacaaataagcccgatctcgggcatattcaaaaaggtttcacaacatcggcttggcacggaggtcaatatcccctccacgcatgaagactccgattcgaatcatcacaactatgtatcaagataggtagcactacgctcgggttgagcagcctgcctagcagccaacagctcgatgccgaccttccctgattttgatgatttcagccctaattaggaccagtacagactgacagaaatcgagcatttctgtgtcagtgcctaaataatgattataagaggatcattttacaatacacagtaacaccataggcgacttatattattttcagggctggactatcgaaatctgacatgccccagcatggcgtttgattggctggatcggtgaactcggatcgcgctacgcaatttcatcctctaacgacatgaagcgtgggcaaagaatctccttggcatcgaaaatattgatcgttggctttgaatcattgctgatttgctatcttcgcagcttttactagagcttcttaggttgaaccagacaacaagaatctttaaaaacttccgtggtagctattgtgattgggaaactgtctttgttctgaaaaagattatagcgttgggggccatttcaaaatacaaaaaaagactcgtgtgtgggatctagtgcatcacctggattgccttggacatcggaatggtagccctcccatcagcaatagccatgtaaatcttcgtaatgtttgttccgatcgtctccttctctcttctgctgtcatcaacaccgccccccaaaaagccagggtgatcaaccaaaccccgatgaaatggaacctgtaaagcgtgtcgtatccatatatgcatctccctcgttgctggtgccaagtatttgggggtagattgacaggccaagaactgtttgcttgtattttgatgatcttcaatcaacgtcaatgtaacatcggttgtccatttcgggattaatgcatatgaagatgggtctgtatcggtgcgagtgtaatgatcaaaaatcaaatgtgcagaatctcgtgccacctcttcacatcgactctctgtctcagattgattgtgtctatgccaggaatctgtgattcccatccatagatcatcgaatgccacagcacggtcggttttgggccagatcttcttgtgaagcgcagacagatgtggctttgctatgtcaaagaaatcctgattcaaggcacgtagatcaagtgcttggcaaaggacatagaaatgtgctgcacacatcattgtcaagatatcaaccgagttggcagtatatctagcagcaacaagagctagcgagttgactgattggttgttcatttcggcaacttgcacatggctaacaacagagttgccaaggtatgccagttccgaaagataagcagacatgttgatatcgactcctttgcaagtgaaagagaggctaggatcatcgaagcaaagattaggtggcaaacccttgttgagaattggatttataatttcctggcattgtgaggctactagtcgtccaagcatgacgatcgcagtcttggtcttttccatggcacttgacacagacgcagcctgaaagttgccaccgtggtggaaacggtctcccgctacatcgataagaggattatcggtagatgagttcagttcagtcgtcacctgtctatccgcgagcatgagatcttcaagcagaggaccaatccactgaggtgccgtacgcaatgcgtaccgatcctgtacgaggccttgctgtttgacgttcattttggtgcttaggtgagacccaatgagaaatgatcggatgttatcagccacctcaatttgtccaggatgtggccgacattgagaaatgaagtcatggtagttgtcaagtgagccttggagggcttccgtcgccatcgcggtcagtagttgcacaagaaccccaagattatgagcatcatgtagcaccagtgcggcagcggcggcgctcggagcagttccgttcattattccaagagcttcttttgcgtccattgtcacgggtgcaatatctgcctgacgcaatgcatctgcagccgacatcactgcctcgagagtctcacccttgacctgcacggatatccctgtatttccctcaaggagcccaccaacataggaaagtggagataggtcaccggacgccgaaatactgcctctcaagggaataataggcgtaattcccttgtttagcgcttggatcagcagttcgatcttgtccattcccacggcggaatgaccccggatgagcgagttacaacgcaataaaattgcgcctcgtgtcacatcctccggtaatgcgtaggccctgtcgtggctttgggggagacccggtagaattccagcctgatgatgttgcagaaatccttgttgtagtattttgagtttcttcgttcgcttgttggcatttccaccacatccagtattgactcctgcaaaaatcgataatcagtacgcattcaattgagatcccaatttatagtttaccgtagatgtcctccccattgttcaggtggatgttaagtgtgtcaatactctcctgcacacgtttctcgattgaaccagatttcgacaaagagacaatcaccgaaaatctagtaaagaaatattagacctgcaatgtgacacacatcaagctagtagatggactagtatacctggccactgcaacaagctgtgccggctccagcgagttctgatcgccactcaatattacgctttcggtttctcttgtcttctcgagaagactccaggctcgttgaacatgttccaggtgtctcatcatcgtgtactgtttcctttcgacagctagggctcatataaagttggtctcgacacaaatgatctgatgaagccttggtggtttttgaattgcaagataggccagacttttcactccttatgtagattgccattccgcgctaaggggaccgcgatggagcctaactgatccacatgcctcaatgggcttgtttcacaagtcacgtatagtatcatcataatgccatcatcatgcgagggggcttgttgggttcttgcagtctcatgacttgggctctgcctgcagcttgcataatgatgtggcaatgagatatcgagtttagattccaactatttcaggatttacacagctgattaatatactaaatttatatgtcctcgagatatatatacctacatatctacttgaaacacgattgcagtaccctctaatctagtgatactcaagtccaatctcaatatgacacagaatacactaagcaccgatgttctcattatcggcgctggtcctgcagggtatgctttgttgtccaagaaacaaaagtcctactgaccatccaccctaggctcatggccggtacatggatggcacaaacaggaataaaggcaatgatcattgataaaatgccatgcagaactcagcgtgggcatgcagacggtattgaaagtcgaaccttcgagatacttgatagttttgggatggcagatagcatatggaaacatgccaaccgcacaatcgacctatctatttgggtaagtactggatctaatcatttcttgttttattatatagatatctcctatccttaccctagcttagtagatgagatttattcgctttttctgattattgactgactgtgcgagaatagaatgactgtgaatctgatggaattcagcggcaatgtatctcaaataactgtactccaggcctctctagatttcaagaagcaacattgggccaaggtcagatcgaagaaaatttcattgactttattcaagagtcgagctcggttgaagtgaagtggaactcatatccagtcgatttgaatatgtgcgaggggtcagattatcctgttcgagtgactgttgagatgagaacatctgaaagggaggtacgccaaattgaactacccatatattggccctcctatcaactttttttctaatgagaaattagcagacatcttatactgtcaattcaaagtaccttattgcgtgcgatggagcgcacagctggattagaacggctcttgggctcaaacttgagggtgaccaaacggatgaaaagtggggagtgattgatttgatacctctcacggactttcgtaagctttgaaatctctcttacaaatacagtataaggaacacttgctgataaaccctcagctgacatccgcaagcgatgcattgtgaagtctgattatagccagttaatgataatcccacgggagcgaaggcttgttcgatgttacgtccaattgccacatgaagtagctgcagtgctctggaaggaagtggatcctgcgttactggtaaacattgtgaagaagattttaagccctcacaccttcgaggcctcgaatattgaatggtcaaccatctacactgtgcgtaaatccacaaacactacatgcggtgattatttctaacttttactgttctcctaggttgggcagagactgtgtaccactctttcgatgtacaaccgagttttcttagctggtgatgccatacatacccattcaccgaaagcgggccagggcatgaatgtcagcattcaagacacgtacaacctgggctggaagctagcatccgtcatcaaagggaaggccaagtccagcattctacacacatatcaaaccgaacgccttcaaatagcaattcggctaattgaattcgacaagaggatggtccagggagtctttcagatggactcggcctcttctgtggagaatgcctcatcgatgagcaaccagatgcaagacactcttgaggaagagaatggatccgcatcaggagtcactgccctctataaacctagctgcttgatcacacgatcgtgggattcgaagggtcaccagttggttcgtcctttgctgccctatagcaagattgagctagccgggaaattggctgttggtgccagactgcccaatactcaagtcttgtttcaatgcgattccaggccttggtctctacaaagggttcttcgcagcactggagagtggcacctttttatttttggtggtgacgtctcgatcaacacacaaatgacacgcgtcaaacgactagcatctgagctttcccgagatgagaccttggtcaacagaatcaatcaacgagaccatgattgtgtcggcaaaatctcaacgtacctagttcactgtgcacctcggaaaagcgtcgacttaatggaattgccaaaactattcataccattcgatgaaaatttgggttatgactactggcgcgtgttcgctgacgaggaactgtactccgaaaagcgaggtagggcatatcaacaatatggaatcggggcggagggatgtaccgtgctggttcggcccgatcaacacgtcgctttgatcgggactctggatgatttcgccgcgattgagctatttttgggtaatttcatgactctagtgtagatactaattcttctcatacacattcgagcttttttgcgacaaataaaccaatgataaagtggtagctgcggtctgaggatggttcaggttgtcctgaatcttagattcgcaatattcacatgggattggacctcgaaactccatgttcattctgttcatctttcgtctcacattccaaggtttagggttgtacctacacgttagctaatcttactgctatacctaggtagacccgcagactcatagaatcaagatcaacaggaagaccagggcgagatgaaccttcggggatctagctttatggcaccgaatttcataccggcgaaataattcctccgagcacagtcatacacagtattaacgtcttcagctcttttaggatgtaatttactgcgatcaccgcccccgagcagcgaaatcgaggatcatgaggactctatggtacaaatcaaagagtgcatcagtcaagcctcctcggaaactcagcgttactaatattgagacatgttgccagctgcatgctccatgcttgtggtcggcgccatgttgcctttcaaatttaccacatcgtcactgcagttcaacacggcgtattgaggcaggtatgcaactcatggaggccggttgtgtatagtagcgaagacaggcggtatttttcttcggaagacaaccacgaaatattgaagatccgagatgctgatctgcaacgaatgggaggtaaaagaggctattggctagtcgaaaatcctgagcatggtgatgttgtgtcccggatccgatcagaatttatggatatcctgagcgtactctgtcaccggaatcaggaagtagtagtaggtgctcaaccaagttgggaaggcgtggaagttgctatccaggagtgcgagcaacaattccctaaatataagactcagatatatcttctctcattatacaactatgaccagttggacaaagggcgcataagagcctgcacacctcacgtcatcagtaattcagtcttgaaatgtttctcaagggtagtgaggctaagcactcctggccttgcatttggtgtgagcgtattatatgatgattcgtcaagcaaggtgggtgaaatgaggggtctcacctatattgtatacatatggtatgtgtgtagcctgccgatctcttctattctccatggtaacaaacgaattctcattggcacacttgtcgataaaatgggtagtatcgtagccccagcttctggtttacttaatccttgatttggacatatacttagcaaggcgaggtagcttcactatggagaggtatatgaatcgtcaaatattgtgagaaccaaaccaagtctaggctaatgaactatctagcttcaggttttacacagctcctcttatgcctcatgccaggcgtagtctcgactctccacgtggcacctcacgaatcttgtcttatattaattataatttgggattaattcgggtatgagaagggcaaaagggaaccttttgacccggatttccttgtttagtagatcatagcttcacctgataagagttcttcctcctcatcaccttgctgagctggagacatgtctcgatttcccgaattcaacaatgtaaagtacaaccgtggagactgcaaccttgtagaaatgctcgtataatcgaggaagaaacgcggcaatccaatatcatcggtctatcatacagaagtgcaagcgctagtgaacgacaatctcatttgaaagatggtaatcgtcagagagcagcgaaaaagcaagtgacagcgtaagcgacagtcaagagagtaatggtaacataaagcaatacaatgattagatgtatgagacaataggaatagaaaagcaaaatgaacaagcacgcataactaaataaatcctaaccagacaccagcatcaggagtctccctaaaacaaacccagaacctttcccgaacccatccatacccaagacaatccctagtccaaccctctatctattccatggatgcagttcctcatctgatcgtgtctcggtagtgtcacccgcaagcatttaacaaaagaaaatggggttgcaagggcaagatgacatcttgaaacaaaacaataaatcgcagatttgaaacacgatcagaccgtccgactccttccagtgcgctggttcccatcaatataaatacaaacggaataagaaaatgcatgaaaaacaaaggaaaataagaaatcaatcgagaggcatagatgtattctctcgtgggaatcaagggcttatgcaatgaggttattaaacaaaggaaataacggaaaattcaagctgttgcgagacacttgtgtcggttgtgaatcgcatcatacagcagtagaccatgtgtggtcacctcgaggtttcatttcgtagttctccggctcggtgctggtaggccgacgaatggtagagttgggaaaatacatgtgcggcggcattgatgtcggatacgcggggccagtgggctcagggtaagtgaagtcgttggctgacccgggcgatggcatgccaccgtgagaaggcgaggcccatccaagactagtcatgtgcggactgccattcacgctattaggacggtgatcactgttggctggaggctcaagaggttgaggcagaccgtagggatgcgatgtcatggatggccggttgtggggcgcactgccgtagctggacagcgaaggagatgtcgcagtcggggaagctcgggggctcccttgggggaaatccccacgcacatgaggcgggatagggccgttgcccatgtagtagtcgccggcagagcggtgcatgttcagcggcgggagctcaccaccaggtgacatggacgggtgatgcgcgggtgacggggtagaatggatggaagcgtgctcggaaaacattccttcgccaggacgtccacggtccttattttgtcgcaattgggcctctgtctcagcagcagcttcttcgatagtcccggtgtggtgattttggtggcgtgtcaacgtcgtgcggcgcgtgaaggtcttctgacagttggcatacgggcatttgtagggtcgcttgccagagtgaatgcggcgatgtctggccagcgaagatgagtcgctgaagggctgaatcaatgttagatttagccagaacaaaaagaggaaagttacacaccttgccacatctctcacacatgtggggtttctctccggtgtgtacacgggagtgcactgtcaaggccgagcgttgaatgaactgctttccacaccctggccactcgcaagcgtgaggtctaactcctgtatgaatacgctctgtgaatcattagcggccgcatctccaaagtttccgaaggatacataccatgtcgagcaaggtcgctacgccgtgcgaagcccttgttgcaggttgagcagtggaaagtctttggtggtgggtcaatacctgctcttccttgtggagcaggttcctgctgcatctggggatcgccagcgtatcccgcaggggcataggccatgtttcgaggggttgaacccgtaggctgtgcataatagaaggaatcgggaagtccaccatccatttgcatgggcgggggaccgtgaggaggatatacattgacgggattttccgggccacctgattcgctcttcatggtgggtgaagctccggtgtgcaactgggcactatgttggaagtactgctgttgtaactgcgcctcagcggcggcggcggctgcagcggagtttttcctgttcaggatggtcgtgaagtccatgacccgacccagcaagtagccaagggaccgcggtcaaggactgctttcgaagacgtccttcggcagaccttccacgcgactagtattccgatgaagtccgatagcttattggattcggagtccttgacgcgttaggacgtaaatgaacagtggaggccgttgggtgggagattcgggtcacaactagcaagctctgcaagtcacggtataattagaaccaatcttcggtacagtagatcgagctcgattctgcagaaactccgcgagtgcgcagctcgtgggaagaccttagaccagaaactcaccctgcgtagacctgtatcgtcttggacagtccctcggcgaagaatgcgacggggtaaattctccacttttctgcagtggaatgcaaggttgcgtaagaggtatcgaacgatgggctttctgccaaaaaaagccaagctcgtctcagagaataatgttgtggtcggctcaaggcggaacgcgtggtcgtttgtcggtgaaggtggaggaagataggtcaactatccctgtggaggttcctatgcaacacaagaaatgtcgatggtcagcatgaaactaatatcaagacgatggttgcgatgccgagtattttccaccgccgtgctgtaagctgattttctcgcctatgctccgcggtcctcggtacgggagaccagtcacaacgccgagttccaggaaaacgaaaaaagaccagaccagcacgtatggggaaattgtccgtgttcacgaaacccaagataacagcgcatggcggagagagttgggcagccaaggcgaacaggcgggatgcgtcatcactggcaaatcgcggtgaaggcaaggagtgaagcgggaaacacacctttttcaacgaagcttgaggtttcaagatactagaatagagaagagtcgagggcgacacaaagagtggctcgagagaatttaggaatttgcggccgggtcaagtggggttaagaaggtagagagacaaagagatcaagaagattggagatgaaatgaaagaagaagaaagggaagcgaagggttaaaaagtagaagatgagaaagggggggggggaggagaaataggaaatattatgattattacatgtttaggtgatttaggtgtggtaggtgccactgtctcttgcatctttgtacatcatttatttacacttggagaacttatttttggcgctctcgtagtatttgtgtattatcttcgtgtcttattatcccggtttcaaatcggacttctgatcctatatggcgtttccatctacatcccacggttgtgctgctatatcagttgcaatccattcagacctctcctaagctgaattccctttctagaaggactagtcttcctagtcggacccagcgaagcccgctagaaggaaacctgaccgcaccagaaggatccacaacgtgcccttctccccgtgtggaaatggatccaaaaggccgatccgaacctgagtttccttgtgattattattatccgcctcgatatagcctcctgaaatttaatctctaaatataccctggagggtggtgtttattcccaggccatggctcaaattaagcataggatcgggctaataaggaaccagatcccaatgttgtaatatacggtgtagcaatgcgttaatagagtcccatatacagtatgaaagggggggggaggggccgaactacaactgacaacccctgaagcgaaatagaaaatacacgcatttctcatccggattttacgattacgataaaaacacaaagaataaaaaagaaaaaggaaggaagggaaaaggcaaaaaggaaaagaaacaggagacatcgatcaacgatgacatgcaagtttctcatggtgcgacacattgagtgatatacttatttttatacgatgcgaaggagattacctcgataatctacccggctgttagccggaaacatcgcaaaatcgagattgaccttctagaacagttccgctatcacaatggtaaccattcctgtacgtacctcacgccgcatatatgggttacacggttggtaggaccaactgacttcgacctgctgttcttctctctgtttcccctcttcttttcttaggtacgcggactctgacgatcctgcagtggagctaatccggtctgcatcggtaattactcaacccctttcccttccggggcctggcttcagcctctgggaatccactccactgccacaaaaagacccgtggacggcacggatggctctgccaagccttctcctgaccttccagaaggacgccagaagcattttggaacatccgtagaagccgtggaagccgtagaaggaaaaaaaaaaagacatgcgcggcgccccgtcctgcgcacggttcggagccttaccaggagatcatccctggctgtgcactatacccttcacatcgaagaattaatgtacgaaaaaaattaaacagagccatgtatctgcctagaggcaaaacaaaatgaaacttgaaaaaaaagggggggttgggcaccaggatgactggtccagtcatatcttgccaggtgacttttcagggctattcctcttcattggcatgatcgtctatcctcttacgctccctctcacacacacacacacctaccattatgtgcccctcgccgggctaatgcacaccctagtaactgtgacgaaagtgacggcacatcctgcatatgcacttgcgcttgccgggtttggtctcaacccgggtgctgcggggagttgcggagattatctcccctctacatacaattgctttgtaaataccatgcagatccgtgtaagccgaataaaggtgctggaatctcaggatctgatgaaccaatgactggcaagatgatttattatagttcgccgttgacttccttgattttacgcaatcgccaataaacagaaaatcgaaccaaggcgggtcaggccgacgcacattggatggctggacacggggcgattcccacatggttgtggctgagacgtgtcttggtgtatcgtgtccgcgctagtctccatatttctattagtagaacatttcctcagtttgtatgcccctaggatggagcatgtcttgtacagatcattttggtgtgctttatagctgcctctgacaaattaggtagcatttctaacttccaaggtttacccgggctcctagtgggtgactaggtctatgcatatgcatatcgacctcggaagatcaggcatgccctatttgttgtacgaccgacgtaacccaaaaaaacaaaaccaaacatccacaaaatccaggaacagccgctaacgctatgaccaaaaggcccatttttctgtctcttgtgtcgcagattccactctgatgtcacctttctcccggggaaattgagcactggcccactgatgtgcctttctcatcccgctaaggtaaatagtcacagataagtcaacgctagctcgtctcagcctgctgtgggagtttgactgaaaatcccggtaacacccaaatcctccgtactagagtggcgtgggagctaatgcagatgacattaaagcattgcgttgccccatgctccactaggaggcgactcggtataaaggaaatagcactccgcgcggagtatgttgtagatggatacgggcgacgtggactaaaacaacacgtccttgaatctccatctcttgttctagtctcggctgccttccggggactcaaaattgcgatttggctctgtttgatggatttgattcggatggttactatcaatattagactctgttactctgtatttaccaatgcattcaccaaatcatttcaattatcacgtggtgacatgcatattctagtagagttgattactccgtagttagtataccacagtttcatatttaatcgttcaatagtcatctccaactacgtctctaagaaaggcttcactggaatctctacttatttcattcacactatagtggcgggaataagaatcaattatttaaacgtggaggttcagatatatattttaggagaatgtagtactgtagttcgtcgagctaaacgttcagataatgaaggcctactgactacaagggtgccaggagccttgctaaggaggatttttagagactgtggctacaataatatgacagtacacgttgagaaatggactctactggcgatgttgtatgtactagtccaagtgggttttatggaacccgagaatatttccgctgccgaaactacaaaagtccccaaggtgggattagctcccctcacagggatccaaagccgcgactaattaggaagtggtatgatgatcatgttgaccgcttttagagtgggtgggctaatcccacatacaacatacaacttacaccggagtttaggcccagatggctttgtttttccgcttcggtgctcaccccgcgccgctttttgcctaatgagtaatgtagactgagcacgcccctgagtattacataatcatcaaactcccgaggtcgcccacctcgcatcacctggtagttacataagctcacaccacgcttcgggttgatatgaaccttccaatctttgtctctctgctccttggctgtcctaacggacgggcctcggttcaatttggagggctgccgctgtatccggttcatgcagaagtagataagatcgatggtcttcacggttgcatattcttcaggcccttgttcttcgataccaaagagcagggttgtcaaagttgtccttggactctagcagtcgacccataatctgaataccacagactgtttcttcagaattgtctcttcggtcgcagcagtaggtagagcatttgcatcaatcttaatattgcgtgtgaagttcagacaccctaaagctcatggatttagggatttagggaagtggggccccatatatcttagatctccgcttcttaaaacctcgcctgtaataatactccgtacggagtagatcaaaccgaattgagaagtgtagagaagttgcttatattctgtgctatcattggcgggggtatcaatattctactataaattaaccacccttcttttcctaaaattccattaaatgcggcgcttttattgagcgcatgaatctaaatctggttacagcacgattaaatgttgtaatatgacgttaaaacagaataaatactaagcttaggaagaaagccggaggacttgaacaaccatggctggctatgtccttgtcagaaaagtggccggataatctgggttcgactagggcttttgtatgaagaagtctatggtgtgcctacgtataagagtgctgaataatataagattaatggtaactagctagttaatttttcccacgcttagtctatagtctattaacattgttcaaccggttgttcgcatttgctcttttacacacaaaatgctctaaaatctcagacatgactagatatcaaattgttaggccagaccgttgaatgaatgtgaagaataattgcttgcctagaattaattgaccagggtaattacaccgtcggattaccacttccatttctaaaccagccggcatctactgtccgcaatgcttacatttccgctttctgccctttgaattgtctcggatatccgaatacagcaatggtcgaagagaataatagattgattagttcattatctggagtagcttcttattagcacaaagaagaagcagggtgttcattggatattattagccaaatagcaatctccaccccaaatcacgcgtatttccttatacccaggcactcccaattctactgcaaggattattctacataatggtttattcagccttgcgatagccttcctaccacctcagcctgcacctatcactaagaatggagaccaagtgcgggataacgggatcgttaatctagtcagggttttgagtaaacagacttgagcttgaatattggtgacaccctggtttaaggtacggtgcgcacttagccatcttttcagttcgcaataatcggcttagtctccctggaaaaaggctagttggtcatcaaggcgctcaggcatctctatatctctataagaacaagctgcggccacggtatcctgaagcgtctttcccatttcggtgaggtctgcccttcctttcttaatactactcctaaagcttagacagggctttcgagtctaggattcgtgtctatatccagggtttatagcgttgaagggccttcatcgcagaaagagacccaattgcatacattggtgtaaatatcccgcgtcctgtttccctggacgacactgtctaattatgttatctgtgcttaaagccatatcgagcgacactaaacaaccatcgattcgcaggtaacaattgttttcaagagcccacagaactgcacgacgaacaggaatttgtctgctagctgggatgggagtagattccctaacggtgcgatattccgctgggagtttagtctctccatcaactggtcgccgcaaatctaagggcaaataaaatactattgcgccggtggtaaagtttctcgtagagtcttttagtatccatataactactcgatacccttaaccctaactgtggcattgcacaccttctgattgatgcacactaataccaacttgggttatttttaccatgtgaaactggtaagctagcagagatgactttcatcatctgaaagtggtggtgatttcctgacttcaactttcagtgtttcatcaaatgaagatatagacgctcgttagacaatatgtctattattgcccttcttttgtacttccccgcattatctgacagttccatgcttttatttcaaccagcaacgggcaccgtcacacacaggttataaagtttggttacatagacttaaatgaccgaatggtatctatgatcgatactccctacagagtatcgtatatatatacctccgttataaaaaaaaaaaaaaaaaccgacaaaaaatagatgaaatagagtagcaaaagcatagaaaggatagaaagaaattgaccctcgactttggcgtcaccgcaccacactctaaccaaatgagttatggaaccaagttcatgtcattattccgaattttaagcccctaatctgatcacatttccagtactccataaaaaaagaaattctacttctgtcaattgtagatggcatgccaaacgtctctattaggtagtagtctccgttctccacctccctaaagatcaacttgctccggatcaacgtggtcctaactgctaactgcttactccacttgggctcacatccgttgtattggatcgacattcaacgccgatcgatcttcaggggttccatgggatcttcgctgggtcacggcattccctatgccgtactttgtaaatattgtctctagtcctgccaagaccaagcagcctgtagtcgagaacatcgttcctcggaactatcctcagtagctacaatcgtgaagcataagaggtaatccaaacatccatatcacattattcaactcatcagagtagacagaaggtgtatctatcgtctataaataacgaaacaaaactccatgcatagtggcattcctttgcccatgcgcccatgtgcctgaaagtgggcttattgacatagcagaccgcccgtggcccggagaccgtataaagaagcccgtacacattgtgtacatgtacaaggcaaaacaaaaacaaaaacaagaatatttatctcttgcgccacgacagctccaagatttgatcaccgttcttctcatcgcgcatgacataccactgagtgacactatcattctgctcgtggacggcatcctgcaaccggaagctctttttgagctcatccttgcgtcggagcggacccaattcgtgcaggtaagattcgtcattggcgccattgtgggggtcccaggtctgctccatggcgaggtcgttccgatctgggtcggagtgatacttgatgaccgagaacccgtttgtcaggatccagccgtcgccaaagtgccatttgcggagaaggcagctgtcgccgcatagctcggcgatcaccgctagcttcggcatgtcggcgtggaaccaggatttccagtggtgcaccgtgagtgggggctcgcggccggactcgaaaaatccagaggcgtcgtgcatcaggtccaattgccgcagacggtgatccaccgtcaaccgggtctgggtgtagcggtagacgcagatggcgatgcggcggtcgcctgtgaaatccatcgcagagcacttatcgtacacgttggtcatttcttctaagaggggtttggataagaaaacgcccgcgcctccgaacccaatcattccgaatgctgcaatctgcgggatagactcggataatccgccaatatacatggaggtagtgtggtcatatttagcgagcgcatccaccagtctcgacatcgacaggaagaatgtgtcgtcgtcgatgatacagccccaccgggttgtttcccgagcattctccttcaaaagagggatgagtgcgaagtatcggttgaggtagtcatcctccgcctctgtgatgtggaggttgatccctagagagtcggccttggccaagacatcccgcacgccgttttccgagcgatccggttcgatcagtgcgaaaatgcgacagcgcgagtatccagcccagtgagcgaatgcattcagagactcattcaatcgctcgatactggtcgcgactccaaaatcgatgtgcgatgcgtccgccaatttcggaggctgggggacctgcaaggacactggtgtgggaattgagcacccgtctgccgcctccccggtagcccttcgcacttccaagaacggctcttcaagccattgcgtgtagggcactggttcgtctgtcatatcgagtatgatttctcggcgggtatattgggcgacgttgataacgttcaggcttgccaatttatcgtagtcgagatcgcacgggacattgggagcgacggtgatgttggcagctgtctctagcggaatcttcactggctcgaccgagggccatagtacagcggcaaatcctaccacaaacaagaagataactccaaatcgcagcacctttttccaagcccatgatcccggaagatacccatctcgagcaccgaatagcatgttttgtgttgtgagattgtgtcgggttctaccgcattgcggagacaattattttggtctagaacagggcccacggtcgcaggcggatgaagtataatataaatatgtccaggcggtatggcgagagatggagaagaggaagaggcagagaaagaggaagggaaaaaggcagaggaggaacaggaacaggaacaggaacaggaacaggaagaacgtgagactgaaagaacgggaagacaagggtcaagaaagggtctgagacacgatcgatgacgttcaaggtctatttggcggaagtcacgtgtgctcgtatagtacatcgtaacttggagattatatcccggtccgagctggggaaaagacagtataaagatgccagcatggctctattgaaattcctccgtttccatatatactactccgtgctgtcttccttggtggtttgctaatttccgaagtgtacaaagtgcagagcacagccgtgctgatgccaagactttctgaggaatgatcccttcttttcactcgtcggcgatttctccggtccccacatccgcgcgtcctctacccgtgtgctacagagtactccgtccaggctttgatagccaaggcactacggagtgtttggccctagataagcactacgatggagtacaacggagtactttccggacggccattgtggtactcgataacaattggcatttgcgatataaacatttagaccctccggcgcagtggttcacccacccagccccactttgaagatgatattcatgcctcttactggaagttactcgaaaagctttggttgcaaatatgtacggagtcctccgtactgcacatcatatggtatcgaaccgacccagctaccgataccaatgccaatgccaatgctaatacggagtagatccgaaaagaaaacctagtttgccttgcgcattgttttcttggttctctccggatttcgccctcggcattatgttcccgaatatgcatagatggtggtcagcgtagaggagacattgcgcttcaatcagctagcggcttactggtcgctcagacagtctcctttcaacgtcgctatccctaggtattacacccaatcgaaaaaagtgatcaacagacttagagtctgtccacgcgcaaaagcccactgcaacctctacactagatgatatatcttcgcaagaacatatgtgcatttaccattagaagagcaggcagacgaataataggaggagagaccaagttgtagcttaaagcttcacactacgtagtaagtctgggtgacgatgaaaaggaagttaggtttagtacctacagcaagagtccccccccggtctaaaccctcgtgaaattgaagtacgggaaattagttcaaattttgtccatatcaagcttactctgcaagaattggcttatatgcagttttgcctcagtacacactctacaaacgccagtgcttcgagatctgtcaccgttcctcgtggatttgtcgatgtcaaattggagaatcatataggacacgtgagctacggcggggcacatatcgttgagcgcagaaaccccccaatggggaaaagaccagttccgcacattggagtttgatatcagttgatctggggaaattggccactgtgttctttgtattaatcacgcgtttttgatcttttatccgacattgaagttaccgtcttcttcgcccgcaaattatcccctaaaattctcgacccccgccatggttgcgcaatcgctggcttcgctattacagcaagcgtcgattgatgaccacgaggaagtccttcagtcatgcaatgcagtcctcgccaaatccaaatccgacctgcaagcacagcacatgaaagtcgttgctctgttgaaactcgaccgttatgaagaagccctcaagacgttccaggccggaggcgatgcgctgaagcagagtgcaggtctggaatacgcctatgcatcatacaagtgcgggaagctcgaagaagccacagaagccttgagtcgcacagcttctgggcgtggtgctagccatctcgaggcgcaagtggtaggatgccccatctgtccttctgttgcttgaggaccaatgttgattgtcgtgtcataatagcgttatcgtactgaacacttccgacggtcagccgagatctatgaacaactctcaaaagatacgacagctttcgggcgcgaggttaacgacctgaacatcaattcgtgggctaccgatgcccagcttcaatggaaaggagagacggaattcgtgcgccacgaccgattgtcgagggaggatttggaatcattcgaaacaacctacaacgcagcttgcttgaacattgcaaagggagcgtttaagcagagcgaggtcttgctcaaccgagctcaaagtcagcatctctccgtcttgcctaagactaagactcagactgacgttttgcatagatatctgccggacatcggaggacctttcacctgaggacaaggccgcagagctgctgccaatcgcagtgcaacaactctatgtcctgattcaacttggaaagttggaagaggccgaggcggttctcaaagatatccccgtggaaaagtacgtttaatcgtacctgctcgaaacctattgctcacatcctttcctagcatcaccgagctatcaactaagaagattgcccgtaacaacatcgtcctcgctcgcccgactgccgtcaatccctacatcctatacaaggccctccacgacaccccagatgccaccaataacgatcggctattcgaataccaggaccgtgatgtgattggaaattcgcatgccgcagacctccttgttcaaaaatacgatggtataatccggtctacagctaaggcacagtcaaaacgcccaagtccatccaccgacgccatcaccaaccttctctctgtattcaacgccgcagcacatgctcaaggcgaaaccggccctaaagcccttaaacagatcctcccattgctggagcgacggcccacagacatcggccttcttctgacagtggtacagctctatgtcagcggcggcaacaccacctctgctatcacagccatggagcaaaccctcggcagtcttgagggcccaaacgagtccgtccgctttaacccaggcctactcagcgtccttgtctccctgtaccagcgcgaaggccgcatagtccagatccgcactaccctcgcacaagccgcctcctactggcgcactaagcccgagccccccgtgtccctcctccgtgcagcagccgcctcccttttgcactccgaagaccgcacagacctagctacagcgggtgatatattccgtggtctgcaccagcaagaccccaatgaccgcgtcgccatcgccggctatgtcgcctcacaagcaaccctggactatgcgcagattgagtccgagctcgaccgcctgccggccgtcaacgacctgatcgccgacatcgacgtctcagctctggaatctgctggcatcgctccctccgcatcctcggttgccgcggccgctgctgcctttgctggtgcccgcaagcgcaccgctgctggtgccgatgagcgcgccaacaagcgtgtccgcaagtcccgcctacccaaggacttcgatcctgccaagaagcctgatcccgagcgctggctgcctgtgcgggaccgctcttcttacaggcctaagggtaagaagggtaagcagcgtgctgcagcactcacgcagggtggtcccgtcaatgagaaggcggaagagtctcccgcccagcaaccgcaaaagaccggcggaggcggtggtggtcctaatgctaagaagaataagaaaaagggcaagcgatagtgtaatttcagatagaaatcatagctcgaatgctacctacgatacatggaacacaggtatgtatcttgtatttcatattgaagggcgcctcaaacccgagacgggtagtagaatgaattcccactggctttgtttagcccccaagactccaatctttgcgataaccgaatgtaagcaattcctgtataaccaagcctaaagcaaattttcgagaaaacaccggacgaaggccctctctaccacatcaaaccgtctgttgagcaatcaacgctcaacccagcggagtccgaatggtaccacactggcggttgtagtggtcaaagatcatgagcagcagccgcagatccatgactgcgtcatcagcggttgtcttcgccgccgacccatcaccagccaaataagaatgcagagccatgaattcacgctcatacgcctcatcacaggtactaacagtctccgtccgcttcacacgaggacgaggaacagcattctcggtctcgttaatctgatttccattgacattattcgtatcctccgtcccgtccgcttcctcaacgacaacccgcacataggtaccagtactgattttctcaccaggacgcgggaagtcgtactccacactgagagtcttgtgcgcgccatagagagtcaaatgagcatcgcagcgaggcacggcatcaaccccagcctcatagagaagcgtaaacgggcgaccttcattctcggcggaattcgtatagtgaaaaatggcagaataaaacgggtccgtgatagcgacgttagcaacagcatccgggaagcctagcgactcgcgcatcagcgatagatcatgacaaccctgcatgccgaggtagcgacagaaagcgactctgtccggtgtaaggtcttctttcaacccgaagacatcttccaacagcgcgtggaactgctctgggttattattgcgcttcattgccggcgtgatatctttcgaggccggcgcgacgatgttgttcatcggaccggcgatgtgtcgacatcgcgcgtagtacacgcggcctaaggaggcgagttccttcttgaagacatccgtgaagcagggggcgtagcggcgcgcgcatccgatgaatacctttgggccgtctgtttcgttggtgccgtcaagggatcgggaggccttgccttttttgattgcttcgcggatgcggcgcaggcttgagacgctcattgagagagggacttcaaccattacgtgtttgccggcttcgagggctgtcacggtgtattgctcgtggtattccattgggaggaggttgaggataacgtccacttctttatggcgcagaacatcttcgacgactgttgtgctgtaggtgatgtcgaagcgggattggcattggttcacgacttcagcgttggggtcgtatatggctgtgagggtgtagtgtgttttgagggaacagaggactgggaggtaggtggcttgcacggcgttcgtggcgcctaggatacttaggcggaggatgggggtggacatgttggcggaagggtaggaagctgcggatctgatgggtacatatggagggaagccgagagacgattgagttctttgtagttcgtctcagctaaatgactgagaaggagaatggtatctcaagtagttgagggattaagggagtttcgaatgtgaaagtgagcaaagctctaaaattagagtaagagcgatgcctcgttgatacgatctcggaacgatcaaacaaagaaaatacggcagtgcccctgtgagctgtgtaccatcggcttcaaggacaggacatccctggagcatgccaactttgtgacatcattgtcctgtgatctagggccacatttcatagtttggtctgagttttaccccggattcgaaccatggctggtaaaatccgatacacttcatacagacagccgcagattatctgtcgatcctatatagatatggatggtccatgctatgtgtacgaccgatattggttggaaatgaaaggcatcatagatagtgacaaagaattatactcccgaagtagactcatcttagaataaccgacctttggctatcatacctctgtaggccttttgagcgatctttgcaagaatacacatgcaaggatgtcagaacaagaataagaattatccacccgacgtacggcagtggcagctctaaccgctagtgcgtcatattagattttgcctgcaggcggtcaaacttgactatagagcgctgcacttctgtggcgtctagtggtactagtaggggttagagactgctgtaacccgacggcttccaatattcttgaaagtggagaagtgttgcagtaaactgaatgaggatgaaccatgttgtatagcgtcacttatcaatctccgagtactccgtacggaaggccaggtcccggatggccgaatactcttccgttgccggccggtacttcaatttccgatccgttcaaactcataggaaaagattaaaaggcctagaaaagttttttatcccgttcaaagttcttggggcgcaaggacaggggaagaagggtgaattccctactagcaaatatattttatacgagtaattcttcattgctgtgaggatccgacttgcctgattccctatccgcacatttgagaacgcagccttgttagaattgtactcgttttcttgaatcgaactggcaagtcacagttgctacagacatgtctgactttgcagagagcccatcaaatctacccctggtagggaagtctgccatcgttactggggctacccgtgggatagggcaggaaattgcccgacagcttgccattctcggggcgaatgttgctttggtttacgtttcaagtaattccaaatcaacagcactcgaaatgatcgacgagtttacaaaccaaggtcggaaatgctgcgcaattcaagccgatctatcatcgggaacctgtggagaatcaattgtcagacaggctcttcaaggccttggggttgggaccatcgaactcttgatcaacaatgcggccattgctcaaacacccgccagcgttgaagaaccgttggatcaagatgaatttgagaggtaagcctttcctgttcacggccttcgtggggatctaaagattgctaataagactaggatcatgcacatcaacgtacgagctcctatccttttggtccaggcattgcttccgcacctaggaccgcatgggaatagaatcatcaacatgtaagtagtttcgacctaattaccttcacaccagcattgaccattaacattcgttgcagttcctcaattggttctaggctgaattttccaggatatggtgtttattcagcaagcaaggccgctttggagtctttgactcgtacatgggctcgagaacttgccgtcaagaatcatctcacttgtaatgccgttttggtaggacccacagcgacacctgacgctcccgacagtgatgcgagggccgctgccaagggtcttgctaccgccgagcggagactcggaacaccgagagatgttgcggatgtggtcgcctggctttcgggagaaggttctaggtgggtgaatggggatttgattggatctaacgggggggcttttatgtcatgattgaatggcccatagttatccgttgaatttacataactcacattacattcgagaacagcggcaatagtaaaaaatattaattaagctgtgttatagtaaacagtttagtgactctgcggagagaccacgactgaggttcaactgttactcggacatagcggggttggactaccgaccggggtaatacgaatctccgtcatctgcctcgcagaaatcgtgggatcggccctcgtaaagaggcgcaggggaaatggttgccgcctaaaatccgtaatatatatagggctgcgtatacatcaatttaatgacttcatgtgagatacttacggatacttcattcgcgagtaaaaacacgtgggaacaaagtatcccgaagtaccttgcgtataccctcactccaactgaagaggggccgctatccacatcaggcaacgtcaccgaaccttggaactctcctctcgtgatactccaaccctcggaaccttggaacttctgcctgtgccttactttatctcctccttgctccatctgattcatcatgggtgtaagtcttccagattcccattcttactagttaccacttcccgagaacccctcaatctgacccatctttagtttgctcagaaaattgccgcagctcagaataacgagaagatggccaatagtggttcatacggaggtgcgcctccagcaggctacactgggggccctcccgcagccttgcaaagtggcggatcggtaagtcatatgttgtgcctgtttctgctatgactcgcagttccgacgtcatcgaaaaaggaaagtgctaacgttcgcagagtcaacagccgcaataccaggcttattcaggatctccggctcctcagggatcggtacgtgctattttttcttaactctttttgctttttactttcccccacttccacgatttacccctccacggtcatcattcttctggaacaaccatgtcgggatcttaccaaggctatcctccatatggcggctcatctcaacgtcagaacaatccgtcatctccctattcccggcctccgccatccacaccctaccccgcagctcagcaatctcaacaaccgcaggcctatggccgcccgcctccacccccaccacaaggccagccctatgcctccgctagttcgccctacccaggtcagcaagcgggacagccatatgcttctccgagctcgccatacccaggacgacagtctgcacagtcgccctatcctggtcaacagcaacctccacaaggataccctggacaacaacaatatcccggacaacaacaatatcccggacaacaacaatatcctgtacaacaacaataccccggacaacaaccatatcctggacaacaaccatatcctggacagcagccgtcatatgtacaaaataccccttgccctgattcaccgcatatttctgttccgtttttgattacattggattctcgttgaacgctcaatggctggaaaagatgctaacgaaaaatagaaccaggcagcgccctattcttctcagggagctccataccccggtggccagggccgtcctggacccgcacctggaccaccaggcggaccaccaccaggccagtatggcgcacccggaggcggccctcaggctgcagctcccccggctacacagcagcaggctgcagcttaccgatcgcttttgatttcaacgattcaagagaggaatctccaaagcttctaccctccggagcgactggaccgacttgttcagtcgctcgccgccgaagcaccggctaagctcaataggctgattcaggaatgggccgtgcccatggaggtggcgaccgatgtcatgaagctctcgttgttcgacgtgattctctacgttgatgatagtggatctattgaatttgaagagaagggactccggaaggatcaactccgacagattcttggtattgtagctactgctgcatctaccttcgaccaggacggtatctccgtccgattcatgaactctagtgaggtgggcgatggcattcgcgatgcggaggatgtcagtcgtctagtgtcccgagtccgtttctccggcctgacccccctgggcaccagcttgaagtccaaggtcattgacccgatggtcgttcagcccgcccgggccaatcgtctcgagaagcctgtgctggtgatcaccatcaccgacggacagcctgctggcgagcctcacggcactgtgggtgatgtcattcgctatgcagtggaggagacgtcacggacccgttatggccctggcgccgtatccttccagttctcgcaagtgggaactgatcagcgggctcgcgactttttgggatctctggaccaggaccctcatattggccacctgatcgactgtacctccagtaagttccacatggggctcatgatggatccagctaatgtggtgttttagacttcgaggttgagcaggatgagatgtcgcgtgctaacccaccagtgcatctcactcgtgagctttgggtaagcgttatataacattgatcatcgcgtattagtaaactaactatgattacagtgtgccaaactgatgctcggcgctattgattcctcctacgacaccaaggatgaacgagacaacgaacgtcgcggtgcacctccacctgcatcgataagccagtacggaggcggaccatacggtcaacccccgccaccccagggccaagctcagccttcatatggtccgccccctggtgccccaccggcttcgtacggttcccagtccggctacccaccgcagggtggtcaataccaacagcagcctccccaacaggccccccagcagggcactcgtggtgcctatggccagcaaccgcagtatgggtcacagcctggacctggctaccagtatggcggacagccgccacgctattgatagagcatgacgtcatagggcttacgagtttcccgtttttcgccatgcggctttgagggaaggttgtggggtgatcacattttagtctacgtagcttcgaacgcgttgaacccaacttgtaacttgaatatcattgtttcgttttaaactggggatttctaggccttccaaggttacaggtctcttgtaatcgggcccgccaaggctacggagtacactaagacgaatcaacccacgggttcgctagttgaggaattgtgaaacctacatttgcagaaacactggggatacacataatacacaaaagggtcgtacatgacctagatatgtatattgttataacattttagcgaaaagagggggggaaagtcactttatactcccagtttttccgttttccatctgcaatagggttgcagggtcttgggaatgtcagggtggccaatagaaagccaggcagatctggatccagcgggccctcgtatgtcgccccaatgcagcgaggaacaatcccctttgattcgacgattcttaatttaacctggatggggctgtgcctgggtgcaggcggggatattgtatggttgcatcttacgcgttgcctaaaactctgccatgaacggggtttgttattgggacggtcttggatattgagacgtttgggttgttccacttgaactccaattttgtcgttatatgtctgcctatcatttatttccgtgtagatcgagtacgtcttccagatatagttggcgcactaggccgttttggggttaccatttctccaaacttggtcttggctactcctggcctctatctgggtttttagtcccttagtctcttggcctcttggcctcttttctttctcttctctacaggacattctacaggaaacaatcattgcgcccttcatttctatccttgcgtccgacgggagtactttcatttgctccacattcgcaacaccttcgttttacgacaaggagaacaaatcttccccgctaaaagaacagcgaaagaatgattgtctgatcagcgtgtgcaatcgaatacttcaatctacgcttgaggggaagttagtcgaggaaggatccaacaatattggtggaaaagaatcaccgagatcgtcgggttctgtcccgcgccctcgtgcctggaattcgtcatgtcgaacaaccaatttacggaagctacagagggtacccgacccgagcagaacaatgtcctccgacgcccatctcttgcgtcgtcacatacgatttccgactctgggcggcggatctcctcccaacatgtacgcttctcaaccgatctcgatcgcgagtcgatcgaggaacaacgacagacaaattgggaccgtcgtcccaattcccgcggcctgaccgtcgaaacagcgctggcgcctgcgtgtgttcgacctgctccctcacccacctctccgctctcacctaccaatgcgacccaaaatgcgactctctcccctattccctcgccaaatcctgagcccgcaggccggtctcggtcacgaaatcgtggttattcgctccggcgcagcatctttaataagacaatcaattcgacggagaaggacgatcttgccctagctgagctgggggaggccaaggaaccctcgtctgatgtgactcccacacaggcttcggctgcggagacgctcactaccgccgatgagaagcatgctctgagtgtcgcgccgacggcgacgcttgactcgatccatacagaggacgcttccccttatgtctcgtccgatcctttggagaagtctcccaaggagcagttccccgtgtctgtggcccatgagaagtggctccggaaaaaggcgactactgcagtggcagtcgcgcgtttccagactgttatggcatctatccagaaattcattctccgaaccaaggatatccctcctactcaggatgggcgccacattgacttgaatccgtctatggtggattctatgattgatgagcgcacccagaagccttatatcggtaacttcattcgttcgagtcgttacagtctctggagtttcttcccccgccaattattggcccaattcaccaaagtcgccaacttctacttcttgattatcgccatcttgcagatgatccctggcttgagtacaactggaacatacacgaccatcgtcccgcttttgatcttcgttggcatatcaatgggcaaggaggggttcgatgattggcgccggtatcgtttggacaaggaagagaataatcgggatgcttgggtgctccgcccaggccacggcacgacccaggacggagcctccatgttcagcaatactcaagattgggagcggatcaagtgtgaggaaattcgtgttggagatgttataaaacttgagcgcgaccagccgattcccgctgatattgctctcctccacgccaccggacccaacggtgtcgcttacatcgagaccatggctcttgacggcgagacaaacttgaaaaataagaagccttgccagcctgtgtctaaggtgtgctcaaccgtggaggatatcaacagcaactccttgcactttgtcgttgaggaccccaacttggatctatataagttcgacggtcatgtcactgtcaatggccaggagaaactgcccttgaccaacaacgagattgtttaccgcggcagcattcttcggaacactgaccgcgctttgggtatggtgatatatactggcgaggagtgcaagatccgcatgaacgccaacaagaacccgcgaatcaagaggcccgctctccaggataaggttaaccgtgtggtaatgctgatcgtggtgttggtcattattctagccgttgtttgtaccgtggcctacaagttctggtctcgcgacgtggagcaacattcttggtaccttcaaggtgctagtgtctcctacggcccgatcttcacttcgttcctgattatgttcaacactatgattcccatctccctgtacgtgagtatggaaatcgtcaaagttgcccagatgctgctcttgaacgatatcgacatgtacgatcctgaaaccgacaccccgcttgaagcgcgcacatctaccatcaacgaggagctcggtcaagtcagctacatcttctctgacaagactggtaccctgacaaataactcgatgcggttccgcaagatgagtgtggctggaaccgcgtggttgcatgacgcggacctccaggaggaggctgctcgtgcaggcgaccacaccaagttgatccacaaaaagcggagcgcaaaggggaaaaaggcaatgggacgcaagtccaatgtttccgaggctcagatgccccgtccgtcgaatgtttctggacaccttgatgctctccgtccgtatggccggtcggctactacgtaccgcaccgaagagatgctcgaatatatccaacgcaagccgtacaccatttttgcccgaaaggccaaactgtttattctgtccatggcactgtgtcacacttgcattcccgagcaagacataaacggaaacatcactttccaggctgcttccccggatgagttagctcttgttcttgcagcgcaggaactcggatatctcgtcgtggatcgtcaatcaaacacgttgaccgtccgcacacaaccgaacggaccagatgaagccactagcgacgaagtctacgagatcatggacgtgatcgagttttcaagcgcgcgaaagcgcatgtcagtcgtcgtgcgtatgcccgaccaacgcatttgcctattctgcaagggtgccgataccacactgatgcgtctcctgaagcaagccgatctggcacgtgataaggcgactgagatcgagcgccgtgcaagcagacgcaagaatgccgaggtgaaccaggtgatccgacgtaacagcgagcaccacagccgaaagaacagtggtgttcggaacagtatgaaccggcctagcttcagccgtcgccgctcgtcgatcactggccaacagggctcggctcttcgagctagtatcgatatttggctgcgtgaccgggagacggatgggggtatgcggaacagagaggctgatagtgagtactacagccctcggccatcggcgcagatgggcagaccgtccgctgcgatctcggactctggaagctctacgaatggtgaagaagacgaggatctcgtggaagaggcattggttgtcaacgaagcggctgttttcgagcgctgcttccagcatttgaatgactttgccactgacggcctgcggactttgttgtatggccaccgattcttggatgaagcgacctacacggattggaagactgcttacaatgaggctagcactagcctcgttgatcggcagcagaaaattgaagacgccggcgagcagattgagcagcagctggagcttactggggccactgctattgaggataagctgcaaaagggcgtgccagaggctattgacaaattgcgacgagccaatatcaagatgtggatgttgaccggtgataagcgggagactgctatcaatgtcggccattcgtgtcgtcttgtcaaggagtactcgacactgacaattttggatcaagaaaatggcgacgttgaggagacaatcgcgcatcttattggggagattacccatggccgcgtggcgcattctgtagttgtggttgatggccagacgctatcgttgatcgaagcaaatgaggtggtgcgtgagcagttcttccaactggctgtcaaggcagactcggtcatttgttgccgagcgagcccgaagcaaaaggcgttcttggtgagatcaatccgcaaacagctcaccgacgcaataacgcttgctattggagatggcgccaacgatatcgccatgatccaggaggcccatgtgggtatcggcatcacgggaaaggagggattgcaggcagcacgtatttcagactactcgatcgcgcagttccgcttccttctcaagctgcttctggtgcacggccggtggaactatctgcgtgcttgcaagtatacactcggcacgttctggaaggaaatgctgttttacctgactcaagcgctgtaccagcgttggaacggctacactggcaccagtttgtatgagccgtggagtctgagtatgttcaacacgctgttcacctcgctcgctgtcatcttcttgggtatcttcaccaaagacctctcagcagcaacactactggccgtgccagagctctacaccaagggtcaaaggcacggaggcttcaatatccggctctatctgggctgggcattcatggcgacgtgcgaagcagtgataatcttctttactatgtggagtcttttcggcctggcaaaaatcaaccccagcgacaacgacattttctccatgggcctactcaccttctccgcgtgcatcatcgtgatcaacgtgaaactccaggctctggaagtccacaacaaaacctacatgtcgctaattgtaataataatttccgtcggcggctggttcatgtgggacctaatcctcgaccgtgaatacacaatgtcctccggcaaaggcatctacttcctcccgtccaacttcatccatcactccggccacaacctgctcttctggaccgtcctcctcctcgccgtctcagcagtcctcctctttgaattcacagtctcaaccctccgcgccctcttcttcccaacagacgtcgacatctttcaagaatacgaacaagacctcgacatccgcaagcgcttcgaagaagcagctgcctcggagctccagcagggctgggaccacggtaccaagagatcaagcttcgagatcgcccgcgacaacgccgagaaggttgaaatggacgcccgcgaacgccaggtccgcgagctgctcgcgcgccctcgtgtcatggataccaaggatgtcgagatcgatattgccagcgccacggttagtcataatagcagcgtgccgagtcgtgatactgaaaaccgtggtcgccaatctggcctctattccgaagacactaataggcctcggcgttctgttgagatccaggagctctttagtaagggctatggttctgtgcgcaagggtcaactcaaatgattcaagattcaagattcaagattcgtatatgtatgatgttctctcctttcttttttttcccccctgctgttatatgttcttttcgtcccgtgtctttctctcatagcgattgcatctgcgattctcctgtccatttacttatcatacgattccctcgggcatcgaagggcgttggtttggttttggttcctgtccacacttcatggtctctcctttttgttcgctgttcggtctgttgcatagtcggccgtcagttataagataccccgactcacatcgttggcagtctggctttttttgtgcgtgtgattcccctttttgctaccggttgaggtgcagtatatatttttcacctcgcaaaattatttttaattaaaagattcagcagaccttttcttgctagtttgccacgaaggtgaagaattaatggagaagcaatgcggttttctagacactaaagtctagagtccagtttacatttaagggcagcttaattaatctaaacactgtatatcctcagtccactactcgtcggtatctgcctccaatgctcctcttagatcttcaagatgtctgagcatgtgcaaactagttcaaataaagacgcttgagaataagcgagcgaatgcttccatcaccggctgatgcgttggtctcaaacgaatctgaaacttggcaggcatttgtcgacaacttttccaaaaccatgtaccacttcggagcttgccttcgagtgcgaacacgacgagcacttgcggttctcgattgtgggataatagcggcggtgttaaaggcaaagaaggtagtgggctcgaagtactccgaattctaggactagaagtagctacgacttttaagcccgaaaaagaaatgccttaagaaccaagaaaacaaagaaaaaacgccaaccactcttgaacttgtgaggccttgaaactgcgatttcatctcttccagataccacgtctaaccccggccgcgctggccacgcgcacgctgcactgtagccttaccacgcgccaaaccgacaccgcgcccgcgctggcctcgtgtacggaacatgggtgcattcctagaagagagtagacagtcagcaaaggtgaaactggagatgcgcagttccgcaaaatcgtaaattgcgatctaaaagctggatatccgagttcgacgtaccggagcatgtcaggcacgatgaagaatcgcacgtggctgccgcgaatgtagacctggtcgagatgggagacacggccatcgcgagcggtgacggtgatgtccttgagctgaacgttcatgttgtcctcggctgtaggaaagagcagtcagtatgtgaccgcgcaaaagaaacattccccgatgcttgtttgacctctagatagagagtagacaccaagctcgagaagaaatgaaccacgtaccttccaaaagcttcccccggtagacgactcctgatgtgatttcaattgtcacgacatggccctattggaaaacgatattagcccctctgcctcgcgcgagatcgtgcatgaattccattttcgcgcgatatgtacatggatcgtataacaatctagatagcaatatcggggaatataacgcacctgcgcttcgttgaggagcttgatcgggatgccgatcgtggaggtgagcttgcccattttgactgtgtgacggcgaacaaggatgaaaaacggttgaaataagtcgaacagaaacaccggaagcttccttcgtaccaacaagggacgaataaaggcaatgggtgatcgtggggagatggtgggacagtaacgaggtcggttaagtggaggttaagagaaaggcgagttttgcggttaagctcatcctctccgctttggctgttccaaccccgaccaaacaacaacctcaacctcaaaaaggcaccaaagaatcacccgtgatgtgcctccaataacgctctctacaccccccggacctctacatcaaaaatccgaaacccaccataatggccggctcacccaattccaacctacgcggcttcaaccacgccgtctacaccctcctcaaacaaccaactcaattcctcccacacctcacaatcccaaccttcacccagctccccgagaacctaggaccacacctgatcaacgcaaagaaagggccccaaacacaaatacccacaatccgcgccctagtcctggacaaagacaacacgctctgcgcggcgaaaacaacaaccttccccccacagatcctagccaaactctcctcactccgcacctcgccaacatccctcttcaaccaaaccacacacccagactcaatcctcattgtctcgaaccgcgccgggagtcacccgcgcttcgacggcgaagtctccgagctggaagcgcagcttgcgcctctgcgcattcctgttttccggctgccggcgggcgcggaaaagaagcccttttgtggcgaggaggttgtgcggtggtttcgggagaggggggttattgattctccgcatgagatcgctgttgttggggatcggcttgggactgatgtgcttatggcggggatgatggggtcgtggagtgtttggtgtaaggagggtgtgtttgatgttgggatggaggggaagcaggagcggaatgtcttggagaagatggaggtttggattgaatggttccttagggtgaagggagggtatgaggcgcctttgccgatggggtgggagaagcagaagcagtcgtaaggcgtgtactgcgtggtggatgagacctttgatacccttgtataaactgtaccagtatgtttaccagtgtccagtatagtcggactgaactacggctacaatctacatagagctgtatgcaaaatgaatttattcagagcctagcgtcaatcccccaaactcgtataccgccagctcagcgctgtcctacttgtatggtcccgggcagaagatatcacaactctgcgcagcccagaggatcggcgttggttggatgtctgacccaaacaggtgccgacacaacaagctcatgtgcaaaaactcgactccagacccatgatgggaaacgggccattgaaagtgcagggcagacagaagtctagcaccagccttgaaattcacacaaaagagaataaaagaaatggaggggaatggagtcgcaatccaagccggtctgtttggcataaccacgtaaaagagaaatgtaaaaggggaaaatggagaaaatcaaagaatagtgaaaatcccggtcataagtcagaagaacatgaagaatggtaaattgaccgggagcaaagaagagaaaaaaaagtcctgtgggaaacaggaacaaaaagagcaaaaaatcgcttcaggaccggccccagaatagaaagggtataatcaatacaacaagacacaagggtatgtcacgcaagaaacacatcaaagggtaaaatcgcttccctagccatcgccagcgagacgagaatcatccgaaaagagccgtcgagtgggtgtttcaaaacaccgaaactcgacttgctgatatcggacaattaagaaacttcccaaggtgaaaaaaaccccaaagaacccatcgacaagcataagcgccgcatgcacagaaaaggccgtgaaacatcaagagacaaaggagaaacacaaattcaaaaaaaacccctgagaggcaccacactcgtggttatgacccagttggcataccctgcgagtttatctcatccaggttagccataccgtgggagtaatcacccatgccgggagaagggtgagcagagaggccgtgcataggcagttcgaagctgggactttcgtgcgaaacgtcatagttcacatgatgcttcgagtacatatcgttcatcgagagaccgtcatcgaagctagtctgctggtcgtgcgagaaaccgtacatatcggacgagccgtgcgacatgctggatagtggcggcgagtggtttgcaatcagtgggtcggcagggctcatgctagagtaaggagacggtgcgtgagagcccattgccgaggcatccgttgaaccccccgagacgaagggcacgttgaactgaggcgccatgctggcgattggtgtggaatcgtcctgaccggcgttgctgtacatgggactggcgaagtcgggaggcgaaccggtggtcgtcgcggacatggggttgtggaaatccagcccatatccttgggtatcgatgcggaggtcggtggggagatgatgcactgactgtggaacgggtgcgtagatgcctgcttcggtgtggttgtatgggggtggaggtggcacgtggaaggaagacatgggactctggaatgtcgagatgtcaactgcaacaggtaccgaacggcttcgttggcgcttgtggccacgagcagctggcatattgaagcccaagtggttgctatcctggtacaggttcatgtaagttggagcagcaaaatggttgggctgagatgcaggacgctggatgaatggcggggacatcgcagccggcacggcgaagctgctgttattataagccaggcggttctggaaagactccaacgatacaagcttggcaagctgaacgctcaagaccttgggatggcctcccaggtgatgaaccatgatctgactagcttgctgctcctcggtgaaatcaccgcattggtagaatcctccggagttagacgagtccatgtaaaagtgcggcgggcggttcaactccacaacaagaccacctggtcgaggtggttccccattcggcccagggctcggatccccagtttccaaggtgatgttcttgatataggcaaacggatactcgatcttatagccggcagcatcgttgttgatatagtaagtcatgcatgccttatcaggggaatagaaaacgaccaagtccatagcgttttgtccaatgcgccgccagctgccgacagtcaaggaacgacaggtgaagtgagaaattactagattaccaattaattaatgggcgatggagcggagggagttatcaacataccgactttgccagaagggctggtctcgtttgcgtacatgctaggctggccgtatgcgccaacccgtccaaatgggtctcttgcgccagctttgttcggatcaaactgcatcgcgagataatgtcgcatagattctgggatagagtcacatccttcgccggtctcgatgctctttttggccagcatcttgattttagcgcggctaccctgagtcagtaaagataatagaaatacaatcccgagtagcacctaccgattttggaaccagatttgcacagaccgctcggtcatattaatatctgaagcaatacgttccctggtagccgcagtaggtgttgggttcttgttgaattcgatttctagaaggacaagctgatcctgtgttgcgcgttgacgcttgttgtttttctgttgttgagtcagagtgctcttgcgaggaggtcggcgcgtaaccgacgaatgagccgttgtagcactcgaggttgacggagagggcgtggaggctggaggcgaggaagacgagggcgcaattgcgccgtttgatgggtaatgcatttctgtcaacaaagacataatgtagcgtgagtcggtagagaaatatatcgcacgaaaatcgggactgtgtccaagctgttcaatatgtttttttgggtgcgtatattgtttattttcggaaagaaaaaaagtaggtgtgacgatccggccgacaaataatgaggtgggtgtacggtacggagacggaggattggaaatattgattccctcgaagcagccacaggcgcgagagggtcaggttgaagatataaatgaatggaagtgtagcgtagggatccaatcgcgagggtgtccacgtcagtgactggggggttgggttgtaagggcgcgtcgcagaggcgtccggaaaagaggggataaataaaaaggctggccaaagcagctggaaacgaatggcaggggaataagatctccctatatcgacaggaatcaatgaagaatcaaagatgtttctgcagatgctcaaatacccaggttgaatcgatcaacggggcgggaacgggagggggggcaaaccgtcgaggaaacgaatgaattgggcagaaatgagtgaggtataatgtcgccgtgaaagaatgaaacggacgcaaaagaaaaagaaaagaatggagggaatgagaatacaagaagcgcagggcagaagaagcggatcaggagatgggagatgctgactacacagagggaaccggttgatggccaacgcaccggagcctttctggactattggcacctcgtgggggccccattgtttttttttttttttttttttttttttgggccnnnnnnnnnnnnnnnnnnnnnnnnnnnnnnnnnnnnnnnnnnnnnnnnnnnnnnnnnnnnnnnnnnnnnnnnnnnnnnnnnnnnnnnnnnnnnnnnnnnnnnnnnnnnntttggactattggcccctcgtgggggccccattgtttttttttttttttttttttctggttagggcctcgatttctgtctttttttagttctcttacgttttttccctcttttgatgtattctacgagattgcagattgcagaaaatcctggaggggtttccatccgggtcgagtgcatgaagtggtatgtatggagtggagggaaaactggttttggcccctgcgttgacctgcatgagtctaaagcagcacggcgacctggagcaataagagcgcagcgtgagcacccattgtttggaagaggggtagtgccactccttactcgtcgtcttgtccaacggtgtgactctcaggggcagttcaacctggaaatggaatgaatacaaacacactgcaataccgacaatccacgtgagatcgggaatctgagacagtgtcaagtcaatgcgttcggcaaagcgtttgacgaatgaacgaggaggtggaaggacgatgtgatagttttcccctggcaagtttcccctgattcgagcaccacggtgccaggggctaagccagtggactcggccaataagcttgcagttacacgtgcagttccgcggaccgccaaaggagaaacattcaggtacccgccccggcattgattatgattggccggtgggacatgacaggtcattctagaccccgaccccgaccggtactgaattcagggtgcaactctccttcgttgccctaagtcgtacatccgccatatccggttttacgatactgatcccgtcatatgataactatagttacaacttctgtacattattctatacggatatacggagtactccgtcttcaatagccctggatcgtctcaactctccggtgcgtctgtttcttacattgtagtattttacttcgggcattctgaccctgtactgcatgtagtattcgcattcccgtgaatatgatatgtagtgcattatcatccttgacgtgcaaaatcccgggcattccaatctaggcaaataagcaaatacccctgggacagttcattgttttaactccgcgaaccggttcatccataattaccgggaaaagagaaagccccctaaaatacccaatatccaatattccaaaaatattaacttcgttagaagatgaagaaacaagcccctcgatcaagcgcttgcacatagctatccacaattgacaattcagtcccccttggccaaccggagtcattacccaactcacgcagtctatccgtagtttcccagatctgctcaataagctccattgccgagttccgctgctgttctcgatagtaagccgtcatagactcatgcttctgccgaacccacatccgatcctcaggggagacagcctccctcgccgcaatgtagaacggctggggcaacgacgaatcaggcccacaccccgtcgacagatgatccatcaacccaaagcataaatgtgccagatgctgcacgcgcggcgagcacgtctgatcgcgaaaaacccgacgcgcaagcagcaaatgcgctgtccagtaaaagcactcggtgaggatatccaggggcgtgcgctcacatcgcgccgggggtattccacggtatccggatccccaggcgcgaagctcggtgtcgagttggaaggcttcgttgagaacgcctttgtccggctgtgtttcgagcccgtcgctcacgtcgcaggctagatgcgcgattcggactagaaagcacatcaggggctgtgggcatccggtcatcttgtggaatgagggctcggtggtgtcccagcgactctggtcgggctggtagagtatgaatctttgcggggcgtagggtcttcgctgtcgggagatggctaacattacatcgaccatgccgaagcgctgtactgtcatgcgtgcgatggggttctgcggtatttcgtcgaagtagcctagtgcttgcataagccaggaagcgcatttcacgtggggctccagtacgccgtctgctgtttgtgcaacgactatcccctgaagaacgaccgctgtgagcaatgcttctcgctcgtgcttattgctggctacaattgtacccgagtcgcaggcggccctggcttcgatactgagcaaattctttccaagcgtcctgagcattcgctgctggcgcttggctgcgagatcaatgctggttaatccgaagttgagcatatgttctgtcgatatgcagacaatcgtctcgagaagaattggtgaggatagagctgggatagagacctgccggtaggggttgtccgggccatctatagcgggcacattggatgaaacgaggcttacgtctgtgcagatagtcttgattaggaattcctattccacttacacagaatgaggccacgtacaatattcccaggcggatttgtcttctgcagattcaaagcatgtctctgtaaaaagtgtcgagggtcgacctagcatgttttgttctgctcgacgggtatctttgcagcgaggcttatgccttgtcggcattggctcttttggtcgaacccatttcacacccaatggatacttgcagtccaaatcccgcgaagcacaaaatgcgcaaactggctgttgctcgtcacatttattgtgtttctttcggcatggcagacatcctgtcgcacattgatattagcgcctctactagccctaggatgagtcaccataccagtccgtgaccgtgagaacttttcgcttccagccatctatatgatcgaagaaatgatgcgctactgagtaacgagagattgacaaagaataagagtaggggtgttaactatgtgttccccgcagccttatctatgtgagagtcacctgataatcgaccaattagattgttttcacacgcaaaatgtatttcacaatgacattactttgtatatcatgaccggaaagcgtcaatgagggggatagtagtcgctgtagcgaattttttggaatttctaggaagacatcgcggcattgatttaccatacggcagcggaacccgccaaacatgcatatcgactcttcattctcattgattgggaatcgagtgggaaattcaacaaatttgattgtaagaagatacgatagagactaaactgcagagggcgccctatcccagaacctcttgaataacccgaacagttcggtcgactatcaagtcaatctcctcacgggtagtattataaggcggtgccaggataatatgatcaccattagtaccatcgatacccccatttcctggcatcaataaaatcgcatattcgggcttgagacctgtggcgtgtagagtccgagaaagcgcctttgaaggcggatatggctctttcgtctctttatcctgaacgaattccatctataatcatgttaataaataccaacaatgagaacgaagaaaacttacagcccagaacaaacccctgcctcgaatatcaccaacatgagggtgactatccagacgctcgtgaagaagctgacccagatactctcccatcgctcgtacgttcggcagcagattatcctcttgtataatctgctgcaccttgtatgcagccgcacaggcaacggggtgtccctggtatgtctgactgtggacaaaagcgccggtgcccttactcagagtatcgacgacgtgcttgttgacgagcaatccggcaatcggggcatagccggcaccgagtcctttggcaattgtttggaggtcaggaacgacgtcttcttgctcccaggcatggagggttccggtgcggcccatgccggacattacttcgtctagaatgaagagtgctccatgtcgctcgcagacggctttgagtgctttgaggtatccaggcaacgggggaacacagccaagggtctattgaaacagttagcatggttatcttggcgagatcaggttgtactcacagcaccgggcattgtctcggctatgaatgcacagacagtgttagggccaagtctttggaattcgtcctccagttcctgggctagtcttgcgacgtagtcttcggtgctttcgttcgcattcattccgcggtagggatagcattgaggcacgtggtgaatattcttcgaaagaagactctcatagatcctccgccgggaggcgtggtatccaacagcaagtgacccgagggtatttccgtggtaggacgactttcgagaaatgatgttaacccgctggggctcaggaacgggcaactccgtaaaatactgaatggccatcttcacagcagcctcgacagcttcggtgcctattgtgattttagtaaccaatcttggtttagcatggacagatttcttacccgagctcacaatgtaggcacgagacatctcgcctccagttgagtctaccaggaattttgccagactctccgcagcattgttggtgaaaaacatggaatagcagtaggggactttctttaactggtccaggatggcttcgtggacacgctcgtcgctgtgacccagacaggatacagccgcaccacatgttgcatccagaatttcgagaccatcctcagttatcaggtagctgcctcgaccaccgacaatgttcaagggctcatttcgtagctggtggtaaaggactccgctggatggtttgatgccagtggtgtcgacctgcttctcgggcggggtaggcaccgaagctgcttccagttctggtttatagtcacccattgtatggattgtgctgaagagttggagctaaaaaaaaggatgaatcaagtgatgctcactgaagatggatgtgtccgtttgaacagggagggcggggtgccatatatagactcaccccgccatggccagaaattaaaatgcagacgtaggacactgacgcttgaaaatagcccagacgcaacgccgtgattggcaagtctcgccttgtcgcacatcgtcaagttcatacttgggtacgataagctaatcccaaagaggaaatctttgtcggacccacgttcgtcgactgcaaagatctgataggttggataatccagaagatagagcttaatgataacgaagaacgaaactattgggatcgtgtttggatttcaggcaggtctcgtactctaccggctacacatatcactttcgagtccgagaaccgaccgcggcccaaacagacatcattgagcaatcagatacgaaagacgcaggttaccttgggagccatacacgcggactatatccgactcaccgtaggatgatacgcaatagagaccttatttgcgaaaccagcccgatcacaggcccagctacttactactagatagtaaattccccatcattaccaatattcaccgcaccttggctagagccgctctacataagtgcatgcagcccatgcgtacagcggttacatattgaaccgagcgagttgccttcaccggtgatctttaaatcattgctggccaacagatgccataaagcttggcacgacgcggctgtgccgttgaagaatcacgaggtcagtccttcacggatatatatttgccaaggggtgactcatagcttcatctcgtaagcgtaagataatagttatcttcagaccaagtcatttgtgcaactttacccatcgcgtaaaaccgagaaaatctttcaagcatatatttccaacccacaatggcatcatcctccatcttccccttccacgtgggcgaggcttcaaatgaacgcgtaaagctcattcccttcaacccagaccaacactgcgaaaccttcttccgcatatcatcgccccatcccgagatatacacacacttaccactactacccccggcttcagcaatcgaactcaaatccctcttctacagtaattccacgagccatattctgtctttctccaatccagagtcattcgcctttgccataatagacaagacgcagccgccgtccccagaagactctgaaggtgaactggctggcactgtgagctttattcgcacatcgccgacgaacctgtgcacagagattggattcattgtcgtcctgcctccgtaccagggaacccatgtggcaactaatgctgttggactcgctctacagcttgcatttgactccgcggagaacggaggccttggattgcgcagagtacattggtcggctagcacgatgaaccttgctagtgctcgacttgcgcagaggatgggatttgagaagatcgggatcatcccttggcatatgcggtttctaaaagggaagctatatgggaaagttggaaatggcagggagttgccgcctggaagcgatcctgaggatctgtggagagacacgttgagtcttactctgggatgggatcggtgggaaaatggcgccagacaaagggtggtgacggctatggagagatgagcagatgaccctgccgactacatggagaatggtcgagttcgaggattggatgtcagtcatttaggtgatttcggccattcgagagtgggaaatcttttcaggaaagaacagataggaaaagtatcccaccactcaataaatccaaatggaccctctggttcaatcagaattgacgatttgctctgtctatctgggtatcatattttctattaatgatatatagtaatgtgagggtgaataatttgaagtattgactccgtatataccaatgagatgcgaacggctagctgagcctttagctgcttcgccgaccatacggttcaaatggcaaagctccagcaataatcgccatcacaaggtaaagggctgcgcatatgtaaatcggcacgggcgtgctggtctgttactaatataagcattttcccaggagagcaaagagtaaagccgtacatttgcggcctggccgataacggcactcacgattcccatgatacgattgagtccaatggcaacgccatttcctgtgccccgatgggcggaggggaagacctatcgagtaattagatatggacagagttaatcaaagtgagcaagcacatgcctcgggggtgtaggcatagagagtaccgtagtacacattcaagcaaaaagaaatagcacacgtaaagcctagattctggctcgcagtgcgcacctgtgtatagcagaaaaagaaaaccattgtgaccacagctccgataatcatggttccccgacggccccaaaaccagggcgagcgacacatgagtcccgccaacacgggaccgaagatactacaggtattgttaatagcgtagtttcgccaggtaatatacgggctactctctccaaacattgcgccccgcgatgcaaggtaggtggggaggaacacgttataaagaggatacgcgaggccgatgaggagccaggagagccagaccagggtcgtagacagagccattttgcgagtttcaaagaggccgcggagatggaagaaaatttcactcggtgaaatgagccgcgcaaaccaagcagatcctggaaccccacgacgagcggtttgtccgcatgcctggagccgctcaatagtgaggctgcatgggcggttgtgtcgatcggcgatgttgcgtagaacgtgtagtgcttgttcatctttgccctcggaaatgaggaacttgggggtctcttcaaggcggatgatggtcacacggaggatggagagaacgaataccaaggcgccggatgtgtaccatacataacgccatccctggttgttttctcgagtacacgtggaagcgtcgctacaggaaaagttgggaagaaaggcccaagcaaacagacctgcgatgagctgacccagacctacatgttgtgagtcagttcggactatccataggaggtatactggagtgtaagctcaccccaccatgccgccatgagtgtcaatagccactgttccttgctaggaaggtactcgagaaagaccgtggtatcgagaaccaggttacccccagcaccgaacgcactcaagcagacaaacaatcccagtgtgacccaagagggagctgcccccgcgacgatagtgaacacggatgagataaatagggagaagttgaaggcaaaacgccggccgataatgtctgccgaaaagccccaaaatatggcacccaccaacataccaacataaaccgcaatggtgagcccggtggaatatgatgggttgaactccaacctggcctgggtcgaaataatggattgaatcaagagaatgagcgagtcaactgcatatccgaatccgttcaggcaaaatagtttccagtggtggggtgtgaaaccaatctcatcaatggtctgtatatagaggacaaagggccacgggttaatttcatgtctcattggtggtgcgaggatattgagttcccacatcattgataagcgtcatcttcgcagcaagaacctcgtccacctcttctccttgtaagatatcttggtctccattttgaatcgatctttcctccagaaacgagttcaccagatgtttgtccttgcccgctgtacctgtagggacaattgaaccggggaagtcttgagcatccattggcagcgaagggtaatgtttctgtgatttcctccaagctttcaacagaagagaaggctgtcgcagctagtcaagagagaatgaatgaaggaagacgagaaagttccccacgaggggcggggattcctgcaagcgggacagctgtcggcaagcaataatccggctaatagatattgcttcattagcttggctattgttcgtacgaaggtcgatcacccgatggttgaggtggccatgaagctgaacgctgtcagcgataaccacatggcgaccttgatgatttaaagtcatctgtaagaccatttgggcacctgcaagggacctttgatcttgacatttcagattctagctcttccaaaggcaatataagagcgttgcaaagccgcaagacttggcgcacgaggctgaacccgcaatcgtgactcgcagagaagggctggaggggaaacgacgctattcccgattcggacagattttggcgatgccttcactagacgacttcctacagaccaatcgggaacgatgatgcatccaaggcagtcagtctcagacatcccgagcttctctaataaatgaagttccacggcacagctttgcatcagccgcaagcatttccccattcgccgcggtacccaccaaaaacccatgggtgaagaaattgacgatgaatagactcggccagttcgtgtgaaaaggttgaagtggagaatatggaaagccacgatgtcaactactagtaaatgaacaagaaacatgaaggacaggtagggcagctctgtttgtgtcgggctgcgcaaggcgaaaagcgtgtgggatccaagcgtcagctaccaacgatttcctaattgggtaacatatgccgggattttactccgacctgcgtacgcctcaaggatctagcacagtataagcactggtgactacggagtaccgggtggaatatcgactcctgcgggatccactaagaatgaccaaactaagtgaccatgaagcatgaaagggtagagggatatttgggtatttagtctatcgcacaagatcactcaacattcagattgattcaaaaaatcaagaaatactcctcataacatccgctatatgtgaactgccagaaagacatgtgaatgtataatgaatgaaagtttagtacgctggaggtggcatcgtctccgtcatgacactgtgaccatattcctgctccagctccgacgaagcggcagcaagagtggcctctgaaggaaggttgacaattgtcaggtacaaaatgttctgcaaaaggccatggtcagtcaaaaacaacaccaccaagtcagcagggaggagaaaacatgagttagacttacgctcttgatggatcttttaccagcttccagcgccattctcttcttgcggaactgctccagacgaggctcgtagtccttctccaaccgcctcaactcccgatctgtctcggattggctacgtcggtcgttcaagatacgctccctccggtcgttgtactcgtcaaggactctcctctcctcgtcatcaattctgccggccttcttctgtgcacgctgctccggagtaggacttagcacgccgccggaaagcacaccgatgagacctccgttgacggccggatgattggggtcaaggtaccggttgctgaagccacgaccagccggcccgctcagcacatcgttaccgttctcggcggtgtactttgcgcgagcgcgacgatcgagatagtcgttgaagttgtcaaatgccttcttggccttgtccttggtcgaagtcttgcctccggcgggaacgacgccactcttggagcctggtgactcaggcggagaatcagacaggtactcattgtgttggcggtggttatccatatagacaagcggtgcgacagccataggcagaccgccaggtccctgcgactcgccggaaacataattacgcatccatgcactgccgccgccattgctcgagccgttggcagccagtgaggcaagctgcttgagacggctaggattcttgggctccttgagctcaggctcatgtttcataatcatgcaaaacagaccgtgaggtgcgaaaagctcgcggttgtacttgtccatgacgttgttggtcctaagcggggcgctgatcagcatcgtggcttgagaggagagtccttttgttgcacttactttcctctgacgtagcccttgttggccgcccaggcgcccgcttgcactgccgcagcgacgcccatgacgataacctcgggagtgaagctcacgccaagggagacgacttgcacgccggcgaggtacttgttgccctccaagcccgtgttagtctcatcgatgaagcgtaggaatgacctttggtcgatgccgcacaactccagagatggcgcataggcggccatgaagcctcgctcctgagaccctgggcgctgctgcggaatcacgatgggcagaggcagtggccctcccatggtggccatcccggcttgtgagtcgtacctggggtctggggtgggttgccctccaaacaattgggaccgggctgaagctgtccgtaaggtatttgtccattttgagactggccatactgaggttgaccatattgtggttggccatactgtggctgtccgtaaggttgtcctgtttgggaagatccgtaccgaggacgtccaggttgagggtggccgtactgagcttgattaggcgggtaagtagatttgtcgtattgtgattgtgagtgcatgcggtcctgcccatgcatgggcagcttctcggactgcgcgtacataatgttggagaatcgcgacacaccagtcagtactcggttgatgaccaagagagggaaaatcagatgtaagaaataagacaaaaaagaaatgaccccttcgaatcgtggttccaagatggacaagatgccggagcgtccactggaagtgcatctgatagtgccgtgaaccgaacatcctgcatacctctttgggatatggtcgtgggtggcctcccctctatcctgtttaagttagcagggtgcatgtggctctccgtttgaaactgtgcctatgtaccttttttgtctttatccttttaccagcgtcattgtggcagcccggagaattactcctaattgaggcaactcttggtccttgtcgacctccaacgacatggagcccccaaagggccggctttctatgcccgatgcggcaaacggggattcatcacgccagtggtgtttggcattggctgactgacgcccactagcgagcggcatattactctatctgcaactgaatactctaagtgggatgtgtcgtaccaagtgccgacagaacaaggcgtgtcatttatgaacaacgaaatgtatatgagctacgtgttggaagcttcagaaacccggagagaagacaagacattcaatcaatcaatcaatcaactcacacccatcaaaccgccaaacctcgattctatcttcaccactcttgcctaaccatataccgcaaaaccactcacacgtcgacacaatggctgctccctcttccaagaccgtccaggaccttaacggctcttggactgctgtaagagacgaaagatctctcacgtctgtgtcacacgagtcctgtttgttaaccatacctacagaataacaacctgtccgaggagtcctctgccgagatcctcaagctccagggcgtcagctggctgacccgcaaggtcattgccatggccaacgtcactctcatcatcgaccagcgcaaggacgagagcggcaacatcctgctcgacattgagaacaagcctagcggcggcctccctgccacccaggagaaacgtgtcctcaactggaagcccgtcgagctcaaccacggtctcttcggcaacatccgcggtcgctcccgcatctgcaagctcgccgacctcgacgacgactacctccgccagggttgggaagacggcaccgaggaggtcatgcacttcaagaccgagcacctcgactccaagggcgtcgtcacccagcaggccatcggcttcattgtcttcgacggcactcgctaccacgccaggcgggtcttggtcaccaaggccgatggcgagaggcttgagaccaagctcgtctacgactaccagtgttagatatagaaacccggtgtatacatcaaaggacacagtaaactagctttgaggcgatctacatggatcttttcatttgtcttgacgataccgttgctacataaatttatgaaggtatttttgcctacatgagtcccttgctaaattcactttggaatactttggcatacttcggaatacatgtctctgtgcgttttctgtctgtcaaaagtagcgcgcgtgtttcagtgatgataagttgctagacaagagacagctcagaatagcataatgtgcaggtaacatagacatatggtctcgaactggcttgtgaagtacctgcggttcggcgatgggggcagaggaatccacgaggcaaggctgcgttaggcttgtcaacttctctagccgcaccattgcctggctgctggctctgacatttacctcgtgggaccgacgagacagggcaaaggcgagcgaatagggttgtgtgttaacatgtgtggggcttacggctgtctgtatgtacgattaagcatcgtgggtagatccgaaccgcgcctctgccaaggagcgatgggtcttggccaagtgtcgaaagaaacgccgcaaggatactagcatccctggcgatattgagcatacacgtacatacgtacgtagcgtaaataggtaggtatgcttcaaaccagttagtcacaggggagaattgtacagtctagcggccaaatccgacgggatttttggggcttagccactgtggtgtatttaggcacagcgtttttcgccttcaaatcgtcaattcgtcttgctttctctttccagtccttgtttaccgtatcgttgtccgaatctggcattcacctcagccttacctagtgtctccacgcggaacgggacagtcccgtactaagtgcgttggggttgatgccacatttccccgcctatccatcgacaatcatcatcaccacttggtagaatcgccatcatggtctactgcggtcgtccttcaacaagttgcagcaattgtcgcgccaagaagagaagagtaagtcattactgtttgccccccttgataaaagacagaaaatcatcagggaaaaaaaagtaaaaaagacattttggctcacatttagcctcaaaaaaagtgcgataaagcagtcccagaatgcggccaatgttgccgcacgggtcagaaatgccccgggtacagagatcccttaagcctcgtctttcgcgatgagagcacccaggtcatcaaccgcgcccgatcaaaagtctccaagaggacttcgacgggcaccccaaccgaccgcctctcggtggagcgcacagacccatcacaggcacagaaccaacaacaaaacacctccacaccggactatcacgtcagccgcccctccgatgtggtcgacgagaccatgctggagatgagcgacttcgatgtcggagccgggatattcgccggcggcagcttcatgcccgagttgatgagcttcaacgaccctttcaacctggacgagactggactcttctccctccaccaggatgcttcgcccagcgccatgccggtatcgggcgacggtcctggatccgctgcttctgtttctgcctccgcgtctgggcgtcgttcccgtgtgggcgcttctagtgtaggcggcgacgatgtggctctcaatcagttccctgatgacagcagcaaccgcggcgaccgccaacggctaggacacaacaatttcaccagcagtcagcccgaggtcatagcgcgtcccttctccgtgcctctcgtcatcaccggtctcaatttcttcctctctcgctatgtcgttcggcagtccggtccctcctccggcttcttcgactacgctccggccatgctggcgcaagacgacggcggcaaggacatgctcgagggtgccattctggctgtcggcttcagtgggctcgctcgcaccactagccaggccgacctgttaaccaggtctatgatgatgtacacccgcaccatggagcgtgtcaatctcgccctcgccgacccacaggccgcctgtcgcgacagcaccatcgtctctgtccttgtcctcgccctctacgagttcagcagggcctctatcgacggctggaagcaccacattgagggtgccacctcgctactcaacctgcgcggccgctcccagttctccacctcgaccggcctgcagatcttcaaggatgtcttctcccagctcctcacaaactgcctgcgcgccggttcccccattccctcgagcctacgcatgctgcgcatcgaggccggcaacgccatcagcgtctcggatccctactgggtcgcctgcagcggcatagtcgagcttctggatctcttccagcacatttccccgggcggctactcgttctttcctaactcttacggcgccccctccgctcccgccgccccttccaattcctctaactccccctctactgcctctggttcttcccccgcctctacctccatgctctccggtcctctcgagggtgccaacatctccatcgagcacctcgagcgctacctctcacaggtgctcgagattgactaccgcctcgagagtgccttctccaggtgcccttccgagtggcagttcaccgacaaatccaactcgtccagcagcaactacgatccgactggcatccggcgcgatgccaaccacatctaccgcgatgtctggattgcctccatctggaacggcatgcgcatctgccgcatcctcgccaaccacgctatcagccacctcctcctccgcggcgctaacatcgacagcaactggttctttgccaacaactacaccgaccgcctgcaccaggccacccagaccatcgtccgcctgcgtgacgagatgctcgcctccgtgccccagctcatgggctacgccacttccccggcacaggagctgcagcagcacacgcactccaagaacaacgccggctcggccgtcggcggctactatgcctgctgggttctccttactgtgggctgcatgcacaacctcagccacgagacccgtgcgtggactgctgcccagttgcgcagaatcagctgccaagcaggtcttgcgcaggcagatgatttcgccaaccttgttcaatcaagcaacctccgtccaccattgagttgatagtatggaagcatcattcaaatctagatatttcatacagcgatgaactggcctggcgacgacggagaccggtcaaactatgacctctttgtgaggcctttgatggccgatctcaaggcatacggtgctcccaaagggcttgtttgggacatttggaatgaaccagacaatgagaacttttgggttcgctcccagcagcagttgatcgacttatatattcggacacgcaaaatcttttggtaagtggttcttttttaagaaatctgggcgagttgctaatacgcagatattgaagatgccggctttgatcaagttcaactctctgggcctacgcttgcttatagccccgtgtctggcaacaccttgtgggccaactggctggcccatattgcaggcaacgacactattccagagcagtacgcatatcacttagaaggagggacgggtgattgggacaatgacattcaaaacacaaacgtactttgacagcgctactgaagagcgagggccttcctgggcgtcaaatcagcatcaatgagtacgccaacatggctgaataggtccagctgggcagcctggtggatttttcgactggagcgctacgatgcatttggactgcgtggcagcggttggattcttttcttatagagcatacaccgaacatatagggttacacaagtatatatcctttcacaaatcaaaagttaaaccgagttaatcaccatgtccgggtggttaagctcgtctagggagtcgacgtcgatggcggtggacctgcgccttgccagaggtgagagagtccttggacgtatgaaaagggaggatacggacgggagttgtggggttgggaaatattacccaaaatggacagcttggagtccggcaaatggtgacagaaacggaatagcggtggcggtgcaagagaggctcacgcacagcccaaaagatgacagtggacccttaccgccaaggagatctctggggcaggtctccacatcttgaatctattcctaatggggtatgctcgatgttcgttattccacatggagatgcccgaaaccctcaagttgtcattgaatgcctcgttcttctctgtgtttaagtgcacagcccgaacgcattgcaagcttttcatcgtacacctactccaccatgggaggccgctctcttattttatcccctggacattttatttattaccctcgtagctggtgttcaaatgactcttaactttcgccctatccttcatacttgtttcatcagatcataccgattgtccagggtcttcaattcctgccctgaccttataatctagattgccctcaatcagctatcagcaagacacctacccactatattcgccgctccggcccctctcgatccaagatgacgtttggctatcaagatggtatcgctttgttacagctcatcgccttcgtgccctgtctcttcctcgccattcttttgtgttaccagcaaggaatgaaggccgtagcatcatgttggagattcctcattatcctcgcctgtctccgaatcgccggcgctgtatgccagctcatcaccatcactgacgactcgatcgatgttgtcaccacaaaaatcacatgcgacttgttgggcatcgctcccctaacactggctgccgtgggtctgctacaaagagtgtaagtcgcaacctgatatccacctaccagcgactcgagactaacgtaggcaagtcttgtccagaaacgcctcgatcaacaagctctccaaatggatctttatcttcgtcagcatcgtcagcttggtcgggctggcccttggtattgccggcgctatcaaggccctcgatagctacaccatcccccccatgctccaggccgcattgggcatgttcgtcggctgcttgggtctcctgctgaccattctggggtacttgaccatctaccgcaacgagatgcctcgcaacgagaagatcatcctgtactcagtctacgcctgtgcgccactgctcatcgtgcgcaccgtctacggctgcttaggtgactacacgaatatcgcgcggttcaacctgtttgagcccaaccctaccgtcaatctctgcatgggcgtcctcgaggagattatccttatgattatctgcctcgctgttggcttttactgccccccgcccaaggaacctcaaactggtaagccttgtcgttatttaacgtgattgattgttttcgtgacgaatatacgctgacaattcttagatgctgctgatacgacgaattcggatgagaccaacattgtggagaaacgctcctctccccccagcgatacccactccaacaccattgatgctttgaataaggagaaaatggctgaggaggggcgtatagggacctcgactgccgaggttttataagatctggctatccctttataccttacaaagcatctataaccttacactgtctcgggaggcctttcgttataataatacactttgggattagcccctgctgtaaatccaaaaatctaacgaatctctttttcattggtatctctttagcgttaagcacccgtctatttgatataagcctcaagaactagaatagaatactagaaattgctaaatactaaatacccttctaggaacgtttctaccactagggagaaggcctttagcagtagtttctcatcgattcatacattatggtcgagaaataaagactcgattagaactgaaggaatcagacagtcctccgtacagagtcctattcgcgtaaacgctctatcctcgatacagtacgtattattagcagtagtaactcccgtatcacaaggaagcgtatcattcttccaatcacattcattaggagtgctcgggacggacagtgagaggatatagtagagaataattatttttgatggggtatgacgggcagaactacccgcaagcggtaggaagtaataagccaataaaacaacaaaacagcccgaaggcggtctaaacaccataatgttcaacaaactacccatgagggatgggaccaacctgagaggtcaggggatcccgacctgatctctccgtgcagaacgaacattaccattctaaggtattctgatataatatgtcttgaaacatggtagttgtgccttttcggaactaatgtcttgaaaaaagattcatatttgagcgcaccgcgcaaccattcctaggtttccacgaagcgtgctcaaaagagtagggatcgattgggcgatttcatctcttgatgtcaagcaacaataagaatgttctaggtagtgcaatcaaggtgatggttctgtccctctccctcggaagagagccttgttcgcgtaaacatgaatgcacctagcctgtggatcctatgccttctgagtagtccatgagatctcataatggagtcgagttcgaggatgctcaagagcttattatttagctactgaggtagacgctagaatctagtgataggctggaatcactatgctggcggtcgtgtcatctggatcaatcgccgggccccgcgttgaggattggcctgatcgcatagttgttttaggacatacaactaagatgacctttctgaattggatattcttttgttgccaagttctgccaagttgaaaaaagtaaaagcatcgtcctttaacagtttcatacattattctagtctatgttgtggtagcacgtaaaatactaaggaattgcgtcttagcacgtaaccttgacaaagcacatctctgtcagcaaaacaattcaagtcttctcttggcttcagagataggctgcgcgctagcaaggatcgtgcatcctttcctatgcaagcttgcaggatttaaagcagattgcgtgagtattgcgcaacattacatcgaataatcgccatgtctgtactcaaaagaccccccagagaaacctaccggacgtaaacaggcctagtgtcgggtttcatagctatctctggcctcaattgccggacatcaggtggatgctcttacgatctctcagtgacgcgattatcaggtacgttgaggacatatttttctagttttataaaatcagtagaatcgccgggattgatctagactaaaagacctggttcatttatcaatctatgcactagattttccagcgccacacaacccccaaagcataatggggaccgcgggtgattctcgacaagccacggccacctcgatctacagcatagatgcggaaaaccagaccagcaacacccagacagatgacgttggaaagcctgtcagatcatggaaaagttatgtgtgggatacgtgggaacttccgcccgatcaacgctggatgctttttaaagtagacgctttcgtcctcacgttcgcgtctatcggatattttttgaagaatatcgaccaatcaaatgtcaacaatgcctttcttagcggcatggaagaggatcttcagatgtttggcaatcaattagtaactagtatgtgtcttcgttctcacctgagacgtttttaccccttcttttcgacgagatcgagaaggtttccggcatttgctaactacgactgtttacaggcacatctatctggactgtgggatacgttgttggccaaattccgtccaacttgttgttaactagaatctcgcctcgatgggtcatcccctcgctagaggtaggatggggactagcgactatttgtacatcaagtgtcaaatcgtataaagcgttgtatgctttgcgcttcctcgtcggattctttgagtatgtcgatattccgagattctatgcactctctatggccacttactgacgccgttatagatctggattttaccccggcatccattacttactgggatcatggtacacaccacgcgaaattggaaagcgagccatggtcttctggctcgccggttcagtcggcactttgttcagcggtttcctccaagcagctgcttatacaaacttgaatgggacacatggttacgccggatgtatgtgaccgcaattatccttgttttttctctcccggttcttgaattcgctcataccgcttcatctaaaaccaaacgaaagcaagaaactaactgctgacggatgagaatagggcgctggcttttcattattgatggtatcattacgctaccgcttgctctcgctgggtacatattcttccctaaccttccgcaaagcggtaaaaagacatggtggacgacagaagaggagcatcttctgtcaatcaagagaatgcagaatatcggacgtgctggcaagcagccttggactaaggcaaaggcgaaaggaatcctgctgagctggcatacttatcttctccgtgagtcgtacttcatacctttcttatccttgaacaatactgacaatgtcccacagcattgctatacattctctggaacaatggcattccccaacctgctatgggatactggctgaaaagttttaatgcccatcctgctcctctccccggaacaacttacactgtcgcacagatcaataactgtgagttcgagttcgactccgagttctaaattccaatgaacctagctaatttcatatacaagtgcccctccccacgactggtgtactcatcgtcatggcattgatttggggttggctgtccgatgggccgtgtcgtggcgctcgctggccatttatctatatcggcgccgttactactgtaagtcaaagagattttatatctgtcaattgggtttttattcagtggccagcaactaaaaccattcacagctcattttcgcctccctgatgatgaagatgcccttttacacaaacctcaaaggccgcatggttatttattggctgagtaatattggtgtaagtctacaattctgtgaaaccttcaatcgttaccctaacaatgcctttagggtggtgccggtcctttaatcctgagctggatcaacgagatctgctccgatgacacagaaaagcgagcgttgcttgttgccatggctaatgaccttgcctatgttgtacaggctgtcgtgagtctcctcgtccttttcactgattcaagctagatactaatgagcgtgaacgaaggctcccaatttcgtgtggaaaaccacagcatttcctcgtgctcccaaaggatatacttggtcgatcgtactgcaaatgttgctcagtaagaagcccttgctccgtctgattcttgtttcccactaatgataatcccagtcttggtcaccgcaactattcaactgcttctgtggcgcgataagaaaaaggcaggaaaggcagaagcaggtctttcagccattgacaccctcgaatcatcatctatagagggagatatatcggtaggatctagagaggacaacggcaaagtggctagcacttctcgggtcaaacatgttggcttggattgattcaaaaatgtaactaaatatctggtgtgtcactaatccccttttaagtctggaaatgagtcaaaatataattcggatgtgacatagtgaatagaacgtaagatgcataagcatacatacatacatacatgattgcggagcgaagcgaagaaatattaaatgacaaggtctaaggtgtatgtcgtgaccaagttgtctattatgggccgttttgatgtccatcaggtgacctgggtaaatgcactagcttcaatacggctagctcatggtttatggaccaatcaaaatgaattcatactatactcataggtaatgatcattcagtcgttgagcatagagagcagatggctctgtccaagcatccacctttctctatcattatggcttccaaaatgttggggttgtcaagtgccgatcacatgccaatgcctggtttgtcaggcttcacctagctatttaagctagatctcgatcattgtagagaaccgaactttcttcatctctctctctctctcgttccaagacaaaacatgtactagatgcgttcactcgcgtcctttggagctattcgctcgtgcactagcaatcgagagaccgaccagtgtcaatcttgtcgagatgccaaaaagagagagcgttctagacgccgtgcggctatcgagctggggagaggaaaacaaaaataacgtatggaggagagttgtttacgtgtggcctacggcacccctctttccccgcactctctaattactacatagcctctcacttcacaatgactatctggaggcataagaccgacatccctagtaagctattccatttatatccacggagagatggttattgactattaatagtgcaactttcttctttttgtctttcataccttacaacacctcacaaacaactaaaattcactaccagccacaagatccttttctgatttcttcattttcctttgtatcatcagtccctctcgttttgccgtttcaagtcgcagctacttctcgtcctgaaatttcttcttcgggagcgttatcatctggccgtacttcgtgccgaatgctttcctttgccttcaacaccgccatcccacaatcgagaaacacaagtgcccgtcatgctcatactcgaaggtaaagctccgaaagtagtccatgagtttgagaaagttatcgacaaaatgcctgccaagtttcagatcaagataactgatacatttgagagcaacgcatcggccggcatgtttgtccgaatgacctgggaggtatacgcccgcttactgtcaaccgtggatatgaagccgttacttccagttgttgggccctcgcttatcagggcccagcttctcttagaggggacttatcctagctttggttaccttgtttccctagcagacgatcaatgaaggtgcgcagaataacttgcagtatatcctattgctttccaacaggaacggagaccaacgatgaacggtaatacagacttgattgttgatagtacctatattgtaggagcattcaaatccatgggatgaatacctccatataactaatccgaagtgagcatagtaaccttggaagcataccgacggcatagtgtagtggatccaataagcttaatccgataagctaaatccgatgaactccgaaactccgaatttcccccgctttctccgagccgcctaaactccgatcttcgtcatacccgccacagttccccttgtcggtttcatctctttacaatgcctactccgtaccggacttctaactccgttatatgaggtaaattctgcaatacaatgagtcaaagcccctcaaaccgcaacgggccggggctagcgcaaagtcctgcgtctcatcgccgaaagcgaaaagtccttagttgcgagcattgccgatgctccaaattaaagtgtgatcgtaaacaaccttgtggtgcttgcacgcggcgaggatgcgagctgtcatgctcgttcttggttccccccagtgttgcaactacatccattcacattcatccaacaaagtccaatccctcgttgtcaaatgtgccatccaggaacacctccgccaccccctttgcctcattgaggcaacctgctactagttgcttgaataataggtctgagcggtcaggtcctgacgaaatccaagattcccacgatagtcgctgggaagcggttctccaacggccctttccggaacatgatcctgtcgcagcaactgatactttgtctcccttttcaattggttcgagtatgtcgcttcaagatatcattgaaattttgccctctagaacgagctgcgactgtctggtttctcatttcttcaatcacatctctgctctgttccccattctccatggcccaacattccagaagcagtatgttgcattcatgcaacagccctatgaagtggatctctcttggctggctttacttttttctatgtgctctttgacattgaacactatggagccaagtgatcctagactggtcgatttatggccggcgggatctcattccaaggagcaagaggctgtgactttgtcccgccagcttcagcaaactgcgatggtttgtcttttacaagatcaatttttcatccgacataagctcagcacattcgaggctttgctgatggtgatatataatctttctcacaatgagtctgttgatcaagggtgggccctgttgggtatggccttaaatatcggcatagccctacggtgcaacgtcgactctcagggacttaaccatctcgagactgagagacgccgacgctgctgggttggtatattgactttacatacctaccaagccatcctatttcgggatatcgacatgacattccttcttgatataaaaaccacaatgcccgcagacgtgaatgatgctgatatcaccaaagagggaatttcgcggccttctagttctcccacccagatgtctgtgatgatgttcaaagctcgacttttccggatctccactcagatctgtcaccatatatctggtccttcacgacttgagatagagccattgaataaatttgatgctacaatcgccgaggaacaacagagatgggactccacatatctggtggatggtgccccaaacatattggattccagttacgcctattggtgcattctacaaacatatgcacatcaactttatcttcttctacatcgccccttccgccattctcagtcatcatacttccttgcaacatccagagagaggtgtatagcttccagtgctgccttactaggaatccatcgccagatctacgaagttccactgcttcgaccttatctctggttgcttagaggagtcacgagtttaaaggcacttcacgctgccgtggcgctcaattcgtgtcttctggatatgccatcgtcttttgattcaagctcgtaccgggaggagttaaacttacttgtgcttcgaatggagagcctttctcgtcgaagtgctatttgcttgaaggcgcatcgcatacttcttcaattacagtaggttatgctctacgtgatggcaagcaggtttaactaacgaaattttctaggactcaattcggcgcagaaaatccgcaactaccaaattcggggactcggatcgagagcacaattgaagactggactgatatgcgggaatggtttggaccggatctttttaactgggtaagacatggaacctgtgattgtttgactctatactaacttacccagaatttagataatgttggcaatcttcctgcagtttgatttctcctttacattggatggtatctccggtgattccaatgtgtatcaaatgtgttcgccacgctgactagttgttaaaagtgaaattagattcaagttcaaatactcttcagtgggtagagacgccatcaaatagcaatgtgcaaccaattgcaaagtacaaagtgcatgaataactgtttcttgacatttctttgttgcataccaccgactggtgatggaacgatgatattgatgtttgattgacctcaagatatcagatatgacgtatcggtcttcacttcaaagtaattgtgctttctcggatatcatattcaattgtctaaatcttcagttgtactgttagacaaatacgaacgagaactccttgaggagctaaatcaatatagcagactcaaaaatcgaagtctatatattgagattcaggtgagggaggagcaagtatcagccgtataaaacgaccaaaagcttaatcagactgatccagaagctgtgggtcattctttcgatcgcagaaatccccctggcttacaaaatggaagtccgatactattcggccgaaaagtgactaggactgaccggagttcaagtgcatcggagaaaaatgtggcaatggttcctacctatgtccgatgcgccgacgatcaaatccggatttggctgataaatactaggggccaaatgaaatgaattcatcaacagagcctatgattcacggcccaatgactgccttcacttaaatccggtagcttttactctatggggctcactgatagttaaaatttcggtggctttctcttcttagcccactttcttcttcatattcactgccggtcttcagttgttttcctacaatggaatcactctttcaatatcgacgtatcagacaatctgttcgcgaccaactagcggaaatcaaagaaaagtgcacctgcgagaactatacacccgggtcaccacacagctcgaggtaagtgatagctcggcgaagctttgcaaatctatctgtcaacctatgctcatactccattatccagctgtcagtcatgcaacgttgggttttcttttccgccgaaccaatcctcgcttcaagcaaaaactcctaccgattccatcatcattgtggactgggatagtcacgatgatcctttgaaccctgcaagccagagcgtgtcgcagaagctggttatgacccttctggtctcgttacttgctttttctgtaactgccacatctgcgattgatgcttctggcgtcccacaatacagtgaatacttcaacgtatccgaagtagtcgggtctcttgcaacaggtaagtacagacctttgaaatgattatcccttttgcacaagttgaccgttccaacagccttatttctggtcggtttcggggctggctctctcctgtcaggcccattctctgagacatttggccggaatgccgtctacctgataacaatgctcctttttctgatttttatcatggctgcggcactcgctccaaatctccagggccacctgatctttcgttttcttgccggcttctttggctctactccactcagctgtgctggtggcacggtggcggatttgtggaatccagtacaaaagacgtacgcttttccagcctatgctattccatcatttgtgggacctatggctggtcagataataggcagttatattcctactactttgggatggcgttggcttgagtggattatgcttatcatgggaggtgcgattcttcttattgttattgtgttccagccagaaacatacgggcctcttcttctgtactggaaagcaaagattctccgcgaagaaactggggacgagagatacaaagctccgatggagatgaaaaaccaggctttgggcccgcgactgttggcctcggtataccggccatttgcgttggtttactctgagttgattatcatcctgatgtcgctgtatcttactgttgtctatattgtcctcttcacctttttggagggatatacatacgtttttagtcatccgtatgggctttcacagcagatgactagtatactctgggtggggatgctatgtggtattcttctcactagcttcctggttccggtggtttactcctggactgccaaagagtacaagagaacttctactattgctcctgaagagcgactgtggtatgcaatgctgggtggtgcaccagcggtgccaataagtttgttctggatgggttggacctgctatgtaagtgcccttgatttgttcatcattgtcacagtcactgacttttgcgatttctccgtttagccgtccatatctatttggtctcctctcatttcctccgtcttattcgggttcggaatcacgactattttcctttccacatacatgtatatcatagattcctatggtgtatactcggcatctgcattggggttccttgtttttactagatatgtcgtcgcaggcggtatgacagttgctggtgggcctatttaccgttctatcggtgcgcattatacattgaccattttgggggccatcagtacagccatggccacaattccgtacttgctttatgtgtacgggccgagaattcgcaaatacagcaaatttgctgtcaacaccggtgcggaatgatgcttgaaactcggcaaatcccatgcgaagagctttgctgcaaaattttatgcgttcagcaaaagactgttaattagatactgaattagaatttagagctcctaatagaatcaatcaatcaatcaattaacctgttgcagtctaactagctgcgtatgactatgtaggcacttctctactgaagcaagaactcgaagccgaacgccgagccagtattatccctagagagtcatggcttaataaaacctataaaagcctcctgtagctaggaggaaaattccttctatctctgctatcctacttctttttccccctccttccctcccttcttactactattcccgctctcccctgccctagtagtagtagtagtagtattctagcctattaattggcttattcgttaacttttactaggtctcttatctcctagcctcgttccttattattagctaatatctattatcttctataccttattccctaaactcttagcctattagttcctcctcattatccttcttagtatctatttactagaactattaaaggagacctatttggtgtctaaagttagctctatagtaggtagcctataggtttattatcatctccaatagagactgttggtacaagaactgagacatcgatgtgctgattttgcgccactattcccaaaatctgatgaacgctttgtccccgagttctggcgggcggacccgcgcggcatctaaatatccgctgaccccactttccactaggccaaatccttcagtgtaacggataaagataaaggtccgtacaagagggaaacacatgtaagcctgcacaggctcgggaaggaacatctatgtcatcgcacatctgtttcgatgtcgatccgtgaggggttcatcacatgagcataggccgatagatttccttatagtttgagaccccccggtggcccctcgagactggcaagaattagtcttggcacactatcaatacattgtgttccctccacaaagccctttgtatcttacccggttgacaggccttacacctgcataacgtttatctttacattcagatcccagcattgttaacaatacctttcttttccaatcagatcagatggaggtacagtaccggaatctcttagcaagcatagactccggccagatactatatacttatcatagaatagaccgcattacctacagctgaagatgatcataacgtcagaattgttattggagccaccgaatactccgtggatgtaacaaaaatgccttattttgcatcatttttaaggtttcgacgatcttctggtcaagaggtggcccaattgccaacgcatgacgaaatacccttcttcgatataattaacgagggcgtgaagaacggattccgccaattctttcgccgcatgccaacacagatcaatgactatcgcattctctgtgaaactctcgaatttctctgcattgatatcctctcaggtcgcaatatgcgtgatatcattcacgatttcagaaggggcaagagtgattgggatccaagggagagaattgataccggaggattgagaagtttgacacgagactcggcttttcggcttctataccagtttctcctaggtaaattcgagtcggaaatcaaggacagcaacatggcatacaacgcaaccttgttcgtcgtctcccatcgaagaattttcaaatacaaaactcggaaaatggtccgagatgggtttgaggaacggtttcaagtatcagggaagcagctacaaggactcaataagtgggcaatcgacccatcttctcctggaggcatagaagaggaggatatgtctaccgagccagaggatacggttttcgattcggattggtcatgctgaagttacagtaggatactggaccaaagggtaaaatgagtgtaattctaaaaaggagtgttctccgatgtctatcttggtgtgtgtttacaacagcttaccctataaagattcacccacccacttttctagtgccgtatagatctgctaatatttccctaattagtcttagtccctagtattgagcttgtattttgtattatatagagtccctctaattcctctcttctatattgtataacccttgaatttgtcaatttataatatgccagatgaatgctaggcagttagtgatgcacggggaccctactatatattaaatttagggtcgagagcaccattgctcggatattaaactactttgaatctgtaaatataccgaattatataccatgctacttatgcgcccaggaaaacgaagtggaggtgggtgaatctttatagggtagactgttgtacaaaatcgcgacaagtggctgctgactactaatacaacactagaagtaaggaacgtacggaagtgcgtcatttctggtcgacacaaaacgatgcctcatcttatgtagacctttttgtatggatccgacggacctacaggtcaccttacaacaaacttctcttattactcttccagaatagaatactgaaggcagcatgaatgacctggaaacagcggtctagataatgcaagtaagctacatggataaatcagggcaatactatctcgtgtaccggaagggtacatatgcgagcagcacaggataagtctgcatgaagtgggtgtatacaacttcgacaaaaatatgaaataaaaagaggtaattaaaagaagaaatctcgagaaaatagatccgccgaccaaaagtgaggaattagaaggcgtcttagatgcacgttgaccttgaaagcacgttgattatataatctcccgtgatcaagtcaagctcaaaagcggcaagaggtgagtactaaaatggaaaggggaaggcagacctatccaccccgttatttttacgatgcgggggacagctagccgtctcaataacaccacattctcccactggaaactatcaatggactgaactaggcactacctcactcagattcgctaagagacatctcaatcccaatcgcacccgagacaaaccgccatcatgacctattcagcgcccccatccaaccccgcaacctccgcgaaatccaatgtgaagaatatctccaacccgcgccgcctcctaatcctgacaccaacatctcaatccctcacaataatccccccactcctacactccctaactggtgtgcccgtcctcgacccgccacaacagccagccccttcgccaaccctgaccccaaccccaccacagccagcctcaagctcaacaccctcaccaccaacaagcactttcgctggatacacaacccacagccctctccgcctcgaaacaaaatactacagaacagaagttcccgtatgggttgacgagatcccactcgcgatccacgatacagatgcacaaactactcccacaccaacaccaacagccgagcaatggaaaaccgacttcttaagcacagaagctgagatcgtgcgcgaagctgtcggggctctagttgtgtgcgcgcatactcctagtgatgtgacacctttaccaggctccaatgcaaacgcagaccccgccgagcggtccgacgtgcgcgcactgcgtgacctgatgcgtggtgttggcgctgtcaaggagctcattgatgaggagcgtggcgggctcggtgatgtgactggtgtgtttgtgttgattggggggaggaagggtgctgcgggtgtgggtgtgggtcagccgagatccaaggatgccgatgcggagctggggcttggcgttgatgatggggatttaggtggtggagaggcggcgccattttcggttgggtggtgggaggatcagctttttgatatgggattggtggggtgggaggttgttgagtgggatcctaaggagagtttggatgttgagacgaggaatcaatatggaggtgagttcactgaagcaacccacccattcgcggttgagcagtagtattggaggaaaaactttgcgcacctggaatatcggagcaggaatgatatgcctcacctgcgaatgggctgtatggcaagtttttggattttagctgacttatgctacttctagaacgagagggtatgcatcgtatcaaagaggtccttgagactcatgactggtctatggttgggggtgacgatggctttgacgaagataatgaccctgccatggattccgatgatgatcttcaagaccaactattaggtctgggtagctctcgtgggtttggtgatgaggttcatgaattagagcgcgaaatgttcggtttacgcatggcgatcgagcgtgggggtggtgatggtgatgagagagatgattctgacaatgatgatggcgaagatgagtttgatgttgagagcatggagacattgatgatgcgcatgcaggcaatcaagggtatgattctatgttgatttctcaggctcgctatagttgatattgcggtgtactgacttggcttagatatgagctccgagctgccggagagcgaacggaaacgattcgctgcgaaggccgtgcaagatattatgcgcgagctctgagattacttgttagtatacatagattctaatctgaatattgaatgatcatatttcattttagcatgttatgtagaccattcacattttccaccttcccacggcctatattctgttttgtgactaattcttcctaccatactagcgacaacaccaataactggggaaatatctaaaatgactttcaaaatgaccaaaaaaaaaaaaaaaaacatgacgatagatatagatcccgcactgccacaaactgagccacaccgccccaaatgtggagacctctatgcacttctgtgacgtcagaatattccaaggcacgaagccaacttgacaacgagctatgtaccgtgcatggatcaccctggttagcttattgcttgaatgaatcttggcctcactacatgatcttccccattctccacatgttgggtactcgaaagcgccgcgtcgtcatgtcttgagtctcctacacgacataccccttattcaattcctagtctacgacatattctctctcattacatgcgacctgaacatacacaataaccaattggacggacaaaacgatctcttgttttcaatatgcattttccggcacggagttgcgcccctatcctgtcggcgacgacggggaggatatcacaacgtggtgctcagtacgcctcgttggggaagattggctcggctgggatgaatgaatggtctggtaacggctcttctgttttttctagacatatccgttcattctcagggagttgtctcaccagggatattggtctcggggcttctggcgcatcaccggtaacgaagctgagatgtgctgggccggctgcagttccaggagattgccttgcctggattcagaccagaaaattccgcactgaaactcatagacaagcctcaggcgataagcagacgactgaagagctttgggagaaattccaagttaaagagggcaatcaacaagctcagcctcggcggacagttcttagggaggatggcggaaatggaaagtcactgatggaaggagagacctggcctgaaaggttgaccaaaggtaagaagggtggtattatgattgattcgagtgacaatgctgacttttggagataggcaaaatattgacgaccccttcgcggcttttcaaattgatcattcctttaaccaccgtcggcaacgacggtcatgataaaggtatgtcggtcttcaacattatcccgtcacttggccatcatgctaacagtacaatcagaagtcgagcccatagcgatcctaatccaccctcaacagccgctatcatacttagaaagcttgattcagtcagagctacctccaatcaaaggcaacaccgacaagctccgcccaccagccgtatccttcatcgcaatccagcacgacgacaacgctatcaaacccaaaaagcggattgagaacgagatcgacctagacgcaaaccaaaagaaagaaataggcttcatccccggcaatgacggccttggcggtagcaaacccctgaacggccgatcatccacccagtaccgccggtcccgggaagaagacgtcgagacctacagctatccacgcaaaacaaacggcaaacctgagcgcttcgtgcgctggtcacaggccacagagattggcgacttcatccgggatgctgcgcacgcgggcgagttcatcgtgacgattgaagacgcgccgtccggcctaggtcagatccgcgtcacggtgccgtcgttcaacgagcgcacatattacctgcgcatgcggctgcgcaagctctcacggcgcattcaaaccatggcggatgtgaaggagaagtgtgatgcgctggcacatcggggtgcgcagcgggttgcgatgagcggatttggaattcttgccgtttggtggtttacggtctataggttgacattcgagactgatcttgggtgggatactatggagcctgtcacttacttggtcagtttgtctacgttgatggggggttatttgtggtttttgtatcacaatcgggagatttcttacaagtctgccctggaatttaccatcagtgcgaggcagaagaaactttatttgttgcatcatgttgatttgcagctttgggagtcattggttgatgaggggaactcgcttcgtggggagattaagaatatcgcggctgagtatgatgctgagtgggatgagcgggctgatgagcagcaggatcagcgtgtaacggaagtcttgaagtcagaccgtcggcagaaacatgagaagaagaaaagcgaggatgataagaagagtgaggatgacgattgattattttgatctgttcattctccctaagtgtatgtattgcattccattccatttctggtcatccgatggtctccaagtttcatacttcaattatacaaaatagacattaaaccgcatgcatatgaagcgaaaaaccagaacaatttcttccagaaacactcaatcccaactatcacagcgttccattccgcacaggatcgtagtacttcttcggctcttcctgcctcgtacgtctgtctatatatcaacatccatcagcatcgccttcaccaatcaagcatccaaaaaggaaaagaaagatacacaatacataccagattccgaacccgcagatcccccaacctcccccttcctcctattccgattattcctcacatcacgcgaccgaaaaacactatacaacaaccagccagcaacccagttcgggccgtattcgccattcgtcgccccgcgctcgaataggccgcgcacgagcggcggcgcattgtgacagatctcgaggattgcccagcgctggcagtccgggcggatgtggtgccagaaaaaggggggacgggttgctgggtcggcgcgcacgttgtcaaggaggttggaggtgtcgaggttcatgcggttgtagacaatgattgcttcgtcctagataatattcgttagggggtacttgaaatgtatggtgtgtgtgggtgatatatgaccattggagagggaggagggaagaagtgctgaaggtccggctggtatacttactcgcatggcacggtagtattgctcatggtgcggatcttgcgggtttagacccaatgcgagcatgaattcttctttcgatactcgaggtccgacgggcattgtgattggattcctcggttgggtattgaatggggtgttggtatatagtagagccgagcttgatcgagatccaagaaagaaatcaaagatcaatgtgaatatgaactggagaagccaactcacagcccgcgccaaagccagactttatatatctgtccgcttccaattctaaaacagatcctaacggcgcggaaacccatctaacggccgttgactgcaaattgcacggcgccgaggccgccgtgccgatacaatcagagacgcctatgccggaatgaagcagagcgaacggacagcacgagacaagaaacagaaacagacgcaatcagaccaagcggggaaatgaggcaaagggcaaacccgcaatcagatcgatataacacaagcacaaggatccggagcagaggacagggatctatgggatatacttcgaggctaagccacctcttacctcgcaacaaataaagatgattattgtttcttttggcgtgcatgcatgaccgacaaagggaagcgtaaagatggagggtacgagtccagtgttgcagttgaggtattttcatttggctattctggggctttctggtctgtctcagcgcttacgattctctctccgggattagaccctagtgtacttcttgcatgatttgtggagtcgggtggtacatgtacaatgtacgtgtagatgatcactgcacagccgttgatatacaaccccgggctacgtcaaactgtgacccgggctgcagtgttcgcttttagtggtttagcgtgtgcagggtaagtaaaccgttgggggctggtggaatctagaagatatggtacggcgctgtgatacagtctttctccgggggaagtaggctgggggcatgaagttccgatgtggcaaacgagagcgtgcgtattttacagaagcgcgaaaaagaggaaagcaaaagagaaaaaggaggtagtatagattctcctattcctgttctctatctctcgctcgccccctcgaaaaggactcatctcaggccagggtgacgagtcgaataaagcgagacaatcgcaaacagagtcatcgtggacccagaacttggggtcgaggactgagcgcgaagatagcaggctaagtgcgttctggtatatcgagggcgacttgctgagctcaagtctgctatccgagacagacgggtagaaaatatatgtatgcttgcatgcatgagaaaggggtgtgttttcgaggtcagcttttacgttgtatattacccggagtacacagtcgcggatctagatcgagatctccgtccgacaagaggtacaacataggtatccggtagggaaagaaacttagtatccctgtattctaatatccctgccacgaacctgtacgcatccgccaagaagaaaatcgacacggctctagcttaacggaaccaagtctagaaagccacattccccactgaggtgtggagaaccgttcatcccaagctcgacatcgaggtccactggaacccaacccagcaacaagcgaaacattcaagccatccttgctagcggggaatagagccaaataaggcacctgtgcctacccgacggcttgcaggcatgctgcagaaaagaaactcgttggctatgtcgtgtaaccttccaggccggacactaggccaggatgcaattgagctgagatttgaccgaccggaacccaaatcggtgccgttgcttgcatctgtgtcagctttttgacttcaatggtgagcgcgtacttgcttcccgttgcggggaagggggatccgggtggaagagcttgactcgatttcaattttctcgtttgtgatgggtgcatatgcaatgggaggatagtcagttgaatgggacgagcaacgtggcaacaagtatggccgattgatggtcgaattttgaatgatcgtgtgcccttataacataatagggttgaaaatacccttgcggctgctatacgtgaaaggctattttagtaactaccaaatggtttgggcaaatagatatatcataaaaaggaaaacgacacgtaattcttgacaggagctcttaccgtcctatctccgggtcgattgaacttgtccccgttggcgctgcgattaaagaacggatgtcacattgtggacaagacaagggccagccaaggcggatcatttgcgcaccacgatttgaatgacactgcataatcccgctgctgcatttcatactagaatggattgttgagacagcaaggccaacaatatatgaggagtgtctgtatctgacgcactgaatcggaactcaagataggaagaggattctttaggggcacttcatagaactcaatggttatagctagccaaataggctagatctcagcctatgcaatatgtgagcgtgtcattgtcgctggcgtcgcaccatctccatactgcagattcccggtactcgttcatcattcactattgggcacacaaggccggatgcaagcgtaaatattgcaggacttgctgtcagttagagtagacagtggagggatatgttgttttgagcgcactaaactcgtaaagtgcagcattcaggaattagggctcgtaaagcacgcacacacagagatctagacgtaccctccaatgcaatgacagatctagctgatcaacacaaccgaccaaccaagcggcgatcaaataactatatatccagggttagatcgaccgtcccacataggcatagtataaagttccaaagttgagtcaagcttccaaggttccctagagcattcttggaagtggctgacggtcaaaaagcttttcggggcgccacttctcggctcggatgcttgaaagttatctaataatcagggcaagtgtcgggcagtacttaagcttactcaaacccaatattcgggtactcttgttgattactttagctacattctaaagtctagacatgttacaggctacttcttgcgttacatgtacccaatgcctactatacgatgacccacgaaacaaaaagcgcaggttaaaagcaagaaaacagggcctgatagaggcactcgggtttccgtatgtcgctattgttcaagacccctcggaatcgtcacgattctcgcgcctgcacctacgtgacagatcaggaacatccgtttgcacaccagcgtccggacgggaaagggagatatggtgggggatattgttatgtacgtgtcaagaaagccagagaagccaggatgggagagaagagaaagggagtgaaaaagggcaaagggggaaatgaaaatgaaaaagccagttgccatgctccatccgtcgctaaaaagaaaaaggggagggaaggatatcaaccagtccgcatgacagcttatttaagaagaggcttccttggtgggctcctcagtcttcttggtctcagtggctttggcctcctccttaggctcttcctcgggctcttctgccaccttcttcttctcctccttgacctcctcctcttccggcttctcttcttcgtcctttacctcctcgccgtagtatcggcggaggagtttctcgacctttcgatattcgaccttgacttcatccagagtatttttgatggccttgaggcaaacctccgtgtccggctcgtcaatgagacctgtctcgtccttgtgggcgccgaagttttggatcttctcgcagccgtccttcaccttgacaaggcccagtgtggcagatgagcccttaaggaagtgcccgagggcagagagttcatcgaggttcttgtcatctctgatgctggatgattagtaaaaggacaatctccaaaatttcactagctaggacatcactcacatttccttctgaattttcttgtaggtgttctcagcctggtcaaagaaaccgtacacaatgctcttgctgaagtcgcgatcctcctcgtcatcgtccatctcaaggatctgttcgaatgtgctctcgtcgagtatctccttataatcggagagcttgggagggccctgcttggcctagactcggatatcaggccgaggaacctttgaccacggggtaggaagtacttacctgctcggcctttttggtatcggctggtgccatggttgtgtatgtgtgtgtggaggggatgctttaaggagtaggtgagagcaacctcgtgtaatgcggtggtccggtggataataatgaggttgatgtatccggtctgatgtctagccaatccagatggaatactaggggctctatttgcaaatcccagtcagctcagattccaagtgatccaggtcttggatggatagaacgatgtggcaaatcgatgaacgtgaggtctcgaatgtaaagatcaatgatgatacaacaaggacgtcagaaccgtaagatctgcgcacaacgcatatgtcgtcttacaaagccagtagatgttacggattcaggaaccaatgtggtaagcgagctgttaatggggacaatggtgagcggctccggggtctatggccaaagagaagaggctggaaccgaagcgaaatacagccaccagattgagtgggtagtgagaggtgggaaaaaccaagacaacgggagttgagggggatagaggggtaatgcgataccacaacaagcaggggctggaggggggaaagaattaaaagaaccaggtgtggatgtggtatattggtagagggaataaccagggccattcagcgcatatactcgaacggtggtccagtcacagcctggtaagccagcactagcgcatcgcaagtgctgcagccccaaagccagtgtctccactagggaattgacagggaaaaaagaagatattcaaagagagaggggcaaagaaggaagtgcatcctacctatgatatttttttctcgcttctggagatgatcaagtgccgaaagtgcgacaatgggacacaataaaccgcagaaagaaaaggaaaaaggtcgaaaaggaattaaagacgcagagaaacagaaaggaggatgttgaagcaggcgagggggagggggaagagaggaaatcggaggggcggagagacagaaggtgggagaggaaggaggtgggtaggtcaactccaatccgaagggcccaattcaaggatattgggaatttagtgatttagagaggggaaatatatcagagaaaatcggcaaaaattactcaaaaataaataaattgtcagctactcatttcaaattcactagaatattgtatcgcgaatatatagataagtaatattggtattattttacattcctcgcatcgtcttggcgtggaacaaccccaaacccacgattgcactagaactagtatgttgtattattagttacggggtgctagctatacaatagtttctataaatgcgattttattcttcttctgtagctgtagccgaagtcatccaaaaaaaaaaaaaaaacaattctagacgtccgacatagactagtacattcttctactccgtatggagcagactttattgcttcttgcggctagacagcacattatcatcttagattttcagccacgatctctcgaggaactgttatctctggatcaaatttctccgagcttggttcgtgagcccagtggagtacaaccgtggcatcagctcttgaattgatgggtccactacggagtggaaagaaaatgctcggaatgaacgggacagcccctcgatgacctgctggaagtaggtttagtggagactgatagggtaaaaaaacacaccaaaaacacgacgcgttttctgaccgcaaaagacagctcctatatatctggcagcagtggccataggacgacatcatcgggccgccgatcccagcagggaacgtcatttgctctttccccatgcgaagtatggatggccacacgcggaaccatttagggaactgcaaatagccatagccttttcctttttgtccttggggttctttggaagaatatcggcagaacttttcatggctcggttagtacagcttgaaaagaaaaacaagaataaacttctagtgtctgagtctgagtagacttttagccgcgaagaaaaaaaaaaaaaaaatagggtaagacgtaataattcaggctcgtacagcagggaagcacgatcgacttgggcccaagtgtgcagatagaacttgatccagttggtctggaccctcgaggaccgtgtctaataactcggaacgcgctcgtttggattgtatgttgcatggatttctcatctgacgtactcggtgatagtgagctgaacgaccaatgtgtgagctcacggctccacggctcctttttccctctcagcggggaagaaaggggggtaatattgttgggctaagtcagatgcgaaggattatgctgtcaccgatgacgatgggagttttggtgttttcttccattcctcttttttggtctggcttcacggttcgaatgtcatatgaaaagactggaaaataggttagtgatatgtcaattgaaattggacatgtccacactcgcgaaccgcagccatctttgcttatatagaagaatgggggcatttgcgcatctcctttcccctggattttgcgcgaagtggttggctctccatcataacccaccaatgagaagatgcgacagtagccatgacatcataggatggggccgtagttcagcttcccagccgctgatgtcattttagcgtaacggcaaattacggcaatgacgtcagtcacctcataattacatcgaattactcacttacatacaacggactgtttactcatttactctctacttgtgtaccctaataattccattgtggtctgtcatgcacaaattctaaaggattatatactcataatccctcaacgcctgacagacctcaaaaggcttaagatttacaacatatgcaggataacatcatggcttcgcctacgatgtcagcccgcatacgcctatgaccaatgcatggtagaagtacggagtacggagtaatgagaaatgccaatttcgtcgatatgtgaatcagtttttggtagataatatcggagacaagtggactatgaattcaatgtacttctctctctcaggaactatcaaattagccgatctcatctcaaatcccagctttcaaatcaaacaccaatccctccaatatcccaccaaaaacaagtcgagtccaaaataggccagagtccagactatgcatgtttgctgcatacaagatagcgtcctattgcagtagtccggatcagctagtctctgtaaccctggcagccaagagcgcctctatgggaagccatccacttagctgccgacacatgcactcgattgtgagcgaatcacataaaaactattcttcggcagagagcttctgaagttgtttgcatagctatcatattcagggtgagaagaagagagactgcatggctgacttctcaaaagggcgattgcctagtagcatgtagcacccgactgaatatcagaattctagtgatactggtcttttttaatcgatattgcataaccatcccaataaaactcaacagacaacaaaataaagatgcgctataccccagatctcaaacgccttttctccacagcttcgtcgaggtcttccagaatgcttacgtaaggaaccgtgacctcggtccctttattttgttgatcgcgagcttcccaaccaaatcaacatttccagttcctccattctgggtaacatcatcaccaattgccctgcccccacgaccccaacgagaagcaattccggtcaaaaatggcatcagtcaaaacttcaagcgccccgcgctccggctcttcgggtctaacaaaagcctacctcttcacctacaacaccgtcaacctcctcgcctggggtagctgtgtcgtctacacggcatccctcctcccagccaatgtctcggccaaaactctcccgaaggtcttcggtcagactttctccccactactgctggccacccagtccctcgccctgttggaagtgctgcacagcgtggtaggcctcgtgcgcgcgccgttcatgacgactgccatgcaggtttctagtcggctgctactggtttggggaattatggcacagttcggtggggatatcgttggtgctgggcggaccacccagctgggtgattatgcgtatctcgggtgtgtctttgcttggggcatcacggaggttatccgttatgggttctttgctattaccttgtctgggaactcggtcccaagctggtggacttggttgcggtaagtcttcttttttcttctgtcgtgttccatgggctaatgagtttcgcatttgactaggtacaacactttttacatcttctaccccattggtatctcaagcgagtgcgcgcttatattccaggcccttggacctgctggcaagctcagcccgcttttccgttatcttttgattgcgattctcgtgatctacgtgcctggtatgttcttcttacagggtccatagtattggttactgactacctaccaggatcttatgttctgtacacgcacatgattgcccaaagacgcaagatcatgcgcggcaagaagagagccgattagacagctcacccgcagcacataaatatgcttaaattgggtgggaaacgaaaagatgaattggatttatagctagcctgatgctcaaaagaaatgcaagggtctgtcgtatttaggacccatttagggtccggaggcctctaacagtgcggacatggttcttacctctggttcaatattgcaggagtcaacttgatctaagggtatagacatcatccttattgactaaaaattatcaatatgcctttttggctcaaggcttttccgcgttcctaaactgctaaaattgaaattgttacctagacgatgcgggcagagcggttggaaaacatgccttgtctaacttcttcagaactccgtcaacgtcaacgggcccgggatgtctatttgtgagctcaaagagatagccagatgctggtcttctcgggagtagcgagaaatggcattatcaaagtccccacggctgtaaaagcgctatatcaggagaggtttgaatgatggatagcgtaatggaaatgcgtcgctaggcaccgaggagggtaatgggcttcctaatgcgggtgctatgtatattgcctcctctagtaggcctgctgtaggagaaaaagagagcagtatatgggtcacaacgacgaccactctaagacttgataaggctagatcaggagatatcgcccgcacacgctatttgcgcttcgtgaatgatgattacatcagcatctacgagcgtgtgaggattgacacactagtggacctcgcctctgcttcaaacaaggatatcggcgtaatgtcttggtcgattgtagattgatcccccaaggtactccagattcaatctgctcatgaatcatgagtaacagggtccaaatcccacaagcggtagaagggcgagactccagcttactagacaaaggtaaatgtttttcagtatttagccacggctttcctacactttaagctttgggcctttgctcagatgatcttggaacaatgacgtcattatgggtctgatctgaagtcaatccccggatttccaactttccaacgttgcactctggattcaatgatggcttcacatcttaatgctaactctatttagacatggtcttcaattaattggagtgattattgttagtcaagtaaattttcaattacagagataatggggatatgaagacaagcaagagcaagcttgtattcacattgcgcgcaagactaaagatattgataatggtagtaaagtattcattggcataaaggtcatctgaaactattgtacaggtagagagttgtctttctaccacctgggtgctagcaaaaaaaggtatctcattatcccacagcagtccaattgcatgagcacccgtttagtgcttagcggcctctgtatatcattagtattgattccatgtcacaaccttgttttgttttcagtcttacccttgtggacatcagccttagtgttgtgcgacgcctcgtccttcttgtcgacaacggcatcctttgcggcggtggctcggctgcctaagctggcatcagagtccttggcgacatgcttgttggtctccttcgatgcctcagcaccaccgccctggacggtctcagcaacgtagttaacggcgttctgatatcagatattagcatttgaagacatgttatccaaagacagggtgaggcgaaccttggcggtctccataatgttgatattgaggttgtttgattgagtttggatgtttcaagtatttgttggtttgaagacttatgaaattgtatgatagaagaaggagatggtagaagcagaagaggcttcttatagtaaatggcaggtcggttggtagcagggctcaggttctgacgtcattgaacaagcaaccttggaagaaccgagcaacgagtaaccagctttgtgatgtaatgaaagggaggattacttgttcttacatgtacgatgatggaaaaaactctccacttaccaagctgttctatattgtacaataacagggtaattcgggtcggggtacattgtaggctgctttcttgaggttgtgggggaaatgacgcattaaaaacatgaactttgctattttgccatcaaaagcaagttctctacaatgtgacaagtatcacgttcactatgttgtaattagtcaatccccatgtttgatgacctcggctacatacagcagtataacggacatagcgagggtgtttctaccattaactagagtatatgatactatagtcaaaggttacagatcttacgccgttaaggtgagcaatcgtataaaataagacatattaaattgagaagactattggaagatacgtcagaagaccgcataaagccgtctattcctgttgctcatatgtagagataatgaacgtatgcgtatgttgtagcattgcttgcgcggtaagatataaacaaattttctcgacacgagcagtccttgctaggctctcccaatgagaagaaggtgcctcgcaccgactgatattaattgcttatctttgggctttgccaacattcggtagctctcaggtacatgaagatgaacagcggtatagccgtagaaacctatgtgtactattccagttggtgacgtctgaaactaactcaacccaagagcgacgagataacgaaacagcaatgtgaaatgccgatgtaaggatgttgatttcaaaataagaatgaaaaagttcagggtgagtcggccgtttatgctgcatctatccttgacaaggtcgaactagcaatctgaataattagcacgtttgagtaagatttcaatgtatatttcgatgtctttctttttctacctattatagccaggatgttaaatctcacttttatattagcatatatttgtggaatcaagaagggacctgcctgttacattgcttatttggatgttttgcttgctcatgagtctctcaaatctctctttgtcccattcgtggccttcgttgctttgcccctacaagtttacacagatgtgatgtgagaagggtaaggaatagttagatagtacagtgaaggtttccagatcaggatgacttagcggctataactagttatgacataaaagtactcccaaggcataactagatagcaacgcagacacctttccacttccattctcagtagtcaccccatgctgctccctctctagcaccctaccactcccaatgacgactctgctctcacacctgttttgcaggcagggctgtcggtgcctctatcctagggacccctcttcaatagatagaatggagatgaattgttgaagaagctagaagccataagactatggaaaaatctagcaaagtgacatacagtaggcgaaggccaataaattcaataaacacaaagcaattctgaaaggaaaaaagtagatagcgtgtttgcgcgatttcttgagccccctctatcagctaaaactcgatgccttatctgcaggaattcaaaacatggcatctatcgtaaaaatatattgtaggaatacttcatgatataggcagtcccctgtgtagcagaatgtattcctttcagacaccaaaggctttgtaaaactgataggctactatccggtgccatatctccaggacccggtgcagtaacgtatgcaaaggggctctgtttatataactggttagttgaaggtgaaatcataatgtaaaagcacaccgtgaagggtctattacactttgtcacagcagcttatctgctataagtttgccccggatcttctgggcactccatgatccatccatgggaacaagggctttcgccacagactttcccgtctccctcttcaacgacgtgatggtagttcctttattgatttggacatgaaggttgtagtattgggggcggccacttgtcagctaggaaaagtagaatgttagcgaatttcaaaatagtgaaatccatgccactcagtgtactgcgttaagataggaagaaagagagctcggtagacagaccccttgcatgtccagcctaaagttcacgtccttgaacaactcatgttctccgtgggtgaagcccaacatcttggaatctgggatgctgttgatgaagtccacaagttcttgggcggtcttttttctccccattgtaaacgtttataataatgaactaggctcggttgggcagtaagaaataagtgatgactttgagaaccgtcttgcgtgaatgatttcttgattgagatggtttgaaagacgtgtcccttctagattcttatagtactttgaaatacacaaataccctaggctctttacctcttcatggggccggcggtaactgaacccctgactacatttctaaactcactgtagtaggtccagaacttgcggagtagacccaggcggttagatttgagagttatcattatgccacgaattgaacatgattttcaaaaagaggctgaaacaagcataggtaccatgcgtaataatagtttaaatatacaatatagatctttttcatctttggcaagatcatccctgggctaaaattacgtgctaatgtggagcattacctgcattagcatacgcgcctgccccaaatattggaaaccgactattggaaaccaattagctcaatgactgcaacaatgtgatgtgatggagatgcaggttattgttattcaggattcaatctattcgcaaaaggcccgcgagatgttctaggtggacattattttagaaatttgaaacaccccctacaggaatcttagagtggcgccatctgaagcgcctatgcacatctattaagtggaaggcaaaatggactagtgtgatagcgaactaatttactttcatggttggaaagttcttttttaggcagtctaaagcagttacttgacctcactctttttagaaatacagctttcagaagcatgtgacagccagtcccctcccatgcataataatagcaatagtaccaacctacacaaactcaatggccgtggcagtctcgcccatatttacccttatcagtatatggagcatatattgagaactggacttggcgaattgcaattggctaaatggaactatcttgcctgggaatattttttagttgcattgcagaggaaaccagatcaaatacatgaatgaatcaatgagaaatacaactcgaactagaaggtccgataggtatcatttctctctagaagcacataaaaaaaaaaggcccagcgacttatgaggatattctcgggtatagaaaccactaagataatacgattatggtcatttggatcatgaggtcaagggcgaaagctttgcggacacgatagcttcatttcggctatatctaaaggaactaacatttcctcagcccagcaaaccggtctaatctttttgtcaataaataattctggtggtatgtaaatcacaagaacacttgaaggtctttgtcctaaattggccagatagggagcctcatggtgactttaccaacctaggaacggattctaggttagtggtcattggcatctttaagtatttgattcaaggtattcagaagacatggattgtttttgatcatggatattggcaggcacagatgttattgagagtgggaagccatcacactgcaaaaagccgacattgttgcactgacgctatgaccagatcctatcgcccaagctgcgcgcattgttcatatcagtggtgatgtctccgatccatgcttcgatatcacgggcggagatccaactgtcacaataagccgccgcatagtcaaagtctcttttaacctggctcttatcaaaaacttccacccatcccgggtctagttttctcatctcatctatgaatatatcgcgtaatagagtggcctcatactgccataggtgctcaaagtacacctcactgggttctcccgtatcttcgggtgcatattcctcggttttaggctctaagcgtcgtggtcgctcctctaaaaatgaaggataggagcaggctttccataaaggcaccgctgaaacgcactcccagtctaggacgccggtcatcttcccgttgtcgtcgacgaggatattatgtcgtgagaggtcggtatggaatatcattgacggttctgaatcatcatcatcatcggtggggaagaccagcggaagaagggatttgaggttatcgattattttcagtgtcctcttagcaacatccacttcgtcttcagcgtcgctatcaaggtctccggctgagtgcttattcaaagccgaatgacagtcattttcattgaatgaaaggcgagctgtgatccagtccttacttgagcggaatgggcctcgggggatatcttggtggatatgtgaatcccagaaaaatagcatagaaacaatccggcctacatcaggcaaagcccctgctggagaaccgttgtctggcggattgaatagaagagctcccgagttttttgtcgtaggcgagctaccagcatttggggcggatccctttgccggaactgatattttggtatttatcagctctctagggggcagaatttgctcgctcggtgttgaattatcaacgacagatgtctccccatagatatttccgattccgcgtagttgatttcgaaaaaggcaagcggagcttgccgcaagctccctgatcaggcatgctttcacagcaaaggaaagagatttccagatttcaccgaagggttttccaggcattttggtcatgagcatccattcaaatccaatggggttgtctcgggatggttggtaggcgataattctagggattgggagacttgtgacatggcgcacccaatccattgttgccacttcgctcgttaatttgtaacgtggatcgacgggcaatgagactcgcacgataaatggttcattatctatgctgacgttgtagatcttgttgaatgcaccctgggcgaggaaagtcacttcaacggcgcttgatggccgaagggcctgtactgtctgctttatagccccaggttcgggttcaacagtccatcggggctcaaaaccaaatgtctcttccacccactcgaggccgcggaacggtgattcctgtgattctagcgactgcattttcgggagggggactgtagacgatgaaaccccacttttgccgccgtgttgcaatattttatctaaccgggatggagaaagtatcttcctttttgaaatactgtgagtatcgtggctgtgcatgagctgggggggtggacggtagccccatctcgggaaccttggaagctccagcctccaggttgccccgtggggcttggtattacgcacgtgactcgcatgtcattacctatcttgcaaaccggactttgtctgccaggagctttcctatcttagctgtcactcagggcaatccaggcgttgtcttagcgatctgtagagtattaatagcagctaagcttaggtatctaactatttaactaaacactgaggtctacaatgtacgccagttgttcacaaattggcgagtcctataagtcctatagagtataaattcaagaggtatcaaatcaaacaacctcatagcataattcatcgctaaacactcttaaaaaaatgaatccaccatctagataaagcacatcattagtccgaacataccacctccatagcgaacaataaccacaatcagagtcattcaaaatcccgcgacttttccctctaataaatccacaatcataccaaaaaaggcgtagtcataagcatccatatcataaatcgtaaccttcttccgccgaaaccctcactcaaacctttcccccaaacccgcccctaccatcctcctcaatcccaactctaacgggactacttcccccactccaactcccgccctgcgagctgtcactcctactcccactcacagaccctaaagaaagcacatcatcctcacgagcaatcttccgtcctgcaccaatggcaacacgcagcccctgcatggctccgccatgttcatggcccgccgggtacatgccgtcgttgacggaaaagttgcggcagatgaggtaggcacgcatagcggcactctcccgggccagcgtctcattgctgcagatactgtctgttcgatactcacgattgttgacgcgtacagtgcatgtgtatccgctgttgcttatataggcattgtagattggttcgggccagttgcggcgacgacagaggcctgcggtttggatttggttagtttggttttgggtgggtgggattggttgggctgtgttggatagtgcttcggtgtttgcttctctgcattgggtatatatttggaggcaggatatccagggttggatattggcttgtgtttgcaatgatgtatgacatacatagctcggggagggtgatagtggggagagtgacgacatactggtcaggtagaggatatagtacatcttgcaatttggactggatgcaagccgaaagcgagaaagacgggagacctggagatggcgacgggcaacggcgttgccacttgtccaactgcaacgaattgtgacggttactcggaacgcattggacggatctggcttgcagcgatacgggtttagggctgaggctggcttccagctggtttgcggtcagagaatatgcggattgtgatgcccaacgggtagggggaccgcgtttgctttgctagcagcggggaggatgtgctggcgttccaaaaaaaagcacgattttaagactagtaaaggccaagggtgtctaattcgaagaagatagaaatgaaaagtgcgagagtgagagcgatagagggattgagaacaaaactttggaagaaagattggaaatattccacacccatatacaaatcctagaaccgagtcgccctccccacctcctccgtacaacagggaaaaaagaaaaacaaattaatgaggggaaaagagctgctgcttgccatatacatgattacttctggaaaacaggtggggcttttgcattgataccattcccaagtcataccgcgagctggccggtgtacacagtaccaatagagaagggagacggtcgaaattgcgacagcgcacaaagcaacaagaaaagggggacatttggtatcagtgcagatgacctgaagaagaaaaaggtattaaaccaaagtcaattctaatacccactgttgaaagattgaaggtaaaaaagtcaagtatacagtaaacaatgacagtaagcaaacaaaaaaagtaaacaatcaaaccttgagatagatcctgggacatggatctggaatccgagtatagactacctccactgagtaaacaaagtacaaaaagtacaagaagagaagagaagacaatagatgcacgcaaacctgactcgcatcgaacctcggaaaaggcccccaaaagaaagaggcattaactcaaacgggtattcgaggtattatcgtgtcgttttctcggcgggtttatgatgcgctggcatatctctttgccagtagaatcgaaccgagttatgaggcaccggaaggcaccgtgaactgcgtagtaatgcccctgcaattcgccgatcgaagcataaacattctcggggactaagggagaccttgcaacctgtttgcagaaggtaatacctgaagatcatggatcccagtattccggagtggtttgaatggaatagcggtgctatagtggtactatgctctgtacacgggttatttttttttcgttgccattgctttctcggaatgatcccctcgtttcattttcgccccacgcatcaaagtgcaattaaatttgccgcccttatggatgtcgagacgcgcaggtctgcgaatgctgattggcgccaaggaggggccgttcatgttgtgcagaacgcgcctgaagaggggtcaattgtttatgaaagggctgagtcaatcaaggttgaaaggatcaagtacgcccaatatcggagaatgggaaattgcatgcgctccgaggaagttcagttactcgacaggcatcggactgcagtgatgagctggcattgcagtggggaaaggcgttggatttatctgcatattctaggactgacggttactttttcccccttgggcctcgtgcagctttggtggcaaacagattatgatgtacgtcgtaggaccagtgagaacggcggaaaaggtggaatcttcatcgcgcaaaaggactttgtagactccggaaatcggtgaaacagtcagttcaaaaaatagaaggaattggtgctatgtgctatgaccatgttgtagagccatactcgagccccgaacccaaccccttgcgtctcggtctcattcacagcattatccttagcttgatcgaaaaataatcctcgtggctcccatgccatgaccgctgctatgaccgcggggcttgcagtctcaagactaatcatgcataccttactcgctcggagtccctggttaccaatgacatcctgcttcaatttactatgttctcgagagactttttcaaggaaacttcatccgtcgtggcgctttgtcatgtgtcttctttccggcatcggttcacgcccctcccggttagacagtgaggggttgggcctcggaccagagccgcatttgctccgcggctttgtgcgggatcacatacaaaaggtgcattggctttagccgatcaccctttgaaaacacattagctttatcgcggcttggtgaagacttccaggaaaatgacgatgtgaagttgcttgcgacactcgagtctgtccggtaatgatagttttgagtcgcgctcaatcccgccaaaacgtaacaggtgtggtatgaatcaacatgcctgggtcttggtcagctagatgcgcaaaaaaaagaactgtcacaaataggagtgaacatacttgcccggtttgtcccgaagaccaccgtcgctcccttgacaacatccaaggatgtatcgggttagaccttcgcggctgaaaaggctggtggccggtggctcagtgttatccggcttcccttccagcgaagattcaagcaatggccagcatccaccaacccaatgactgtagcatccatccactagcttatttgttcgtccggagagaccaccttccggggcggactggcgggcagacaaccacgacactagcataggaatgtccatgtgtctgcaggaaccattagcatataaagtttaaatagagtattccgggctagcgtcgcacctgtggaagatctcttcgggaggtcccaagatagatagacatgccagagcacaaaaggcgtatgctccgtgggcctctgccccagggctgccggagatacccccttcaaatgtttgacctaagcgcgagcgtcagcacatctcaaaccttgaagacagaactaccagtaatcatacatcgtgagagatattcaggaagaccactcgtcaaactctctaagcccgcctcccgcgcttgagagcccggagcaagcgtcaagggcaagtcaagtagcgagataagagtcatagcgcagtatgcgccactgcattaatgacatgtcagatcttgcattgaaggaggggattgacgagcggcttcggcccaggaattccacgtaccgtacatcttcctccccgccctcacaaacacggaatcccccatcaggctgcttcaatcggccgatccattgccacctggaaaagacagaaaccgggttagacgcaggatcacaccagacgtacatgcagaaggctgccagtgacaactcacatcgcgtgccgatccaccaatccaaaggcctcctcgcctccaaccatagccagcgatagaacagcggcataactgcccgctatatgggatgtctggccgtggccgccgccaaacccacctgtggggttctgcatcggccgaagcgtagtaatcacactaaagtagaagtttagaatggcatcttcccatattccacgttgtacaaaggagacgatcttttccgaaatcagggtatatcccctccaggggctctgtctccattctgtggatatgatatgacagataggaaaaaaagcaaattgggggagaacgaggcggggaaagggaaaataaagaaaataaatcccaaaagagtaagatgtaaagcatgcacgcaccgttcacgaaatcgagtcgtatcttcgcccagcatagcaagccccgccaacgcccagtagacaatccacgggcggctggcgtccatggcgacgaacccttcgggataatcctcgagggcatcgtagaggaagctggcgtggatatcccgttgcagggcaggtacgccatggtcgttgaagtccttctgagtgctgtggatgcctttcaagaatggcaggcatttttccagcgtcgcgttctgcagatcgatggtctccgtgatgagcgggtcgcggatgggtggcggttgcgtgaacaaggccgggatccccgggcgcggatggttggagtctggattcatggctgtagtcatggttgtcctggctgttggaattaataaagttgaagttgggcggttcttagtgttggatttgtgtgcgttcggaaatcgaacttttcgaggtctcccgatgagcggcattaaatgggatctgaggtattttggagatttgacgctcaaagaattgtaacctggactttcttgctattgttctgtagattgaatgtgaatgtagaaaagcctagaatgattctttgtttccccactcgatctctaccggaattcctatctttgacgacatcgtcacaacgtgtctggttttacttttgagtacggagtatttcttttcgagacctattaactagagataggcattctcgtggacagggaatacatagtgctatttgtgctatttgtgctagctcctgcatgtcacagaaaatagttactatatatgtgtgatggatccgacgccatgcacgccggtgcgcaagtagatggatgtgcttacatgacacccttgctgcatgtgccccccaggatctgaatttcaataaactggacgtgtccagtttcttgttttgtcaggattcacgatgctaacttggcatctcaacaggattcggactatgtccgtgcaataatatcttagccctatttttacgatttcggatttattatttcttttcggaaacaccctagtgtatggccagcagctgaaatccactaactacctttgaggcatgcatactccgtagagggaaccgaatcacgggcatgagagtgggcagacagggagctgattggatctgattaggaaggactcaacggactaatttggggataacacgatccgactgtcagatctcaccaaattcttattgccacgcaggtagtttttcccctccccactgatctcccgggtccggttttatgggatgattttctattataggatctcagttatggcctaggaatatggaatatatgtggaatatttatggaatcgtcataatagaggtatgctatacttatgatatatgagatacctatgatatctagaaattaatagtactccgcacataaaacgagaaaagaaaagaagcaaaacagaaaaaagaaaagaaaaaaggcaacttgcccgtttaggaaagaatccaaagaagaaaagaacatcatgggatcagcgaactccggattgccgtcccctccaccactctactccgtacagagacaagggcacgccgtaatctccctccccctccatctcctaatccttcctatcccaattcccgaggcaaaacacctcgacactactgcaaagctagtccgccgtggcattaattcatcgtccaatactggatcaacgttccctccacgccgtcagccagcctccactctccacaagcaactcccctagcgcatttcttcgctcaccgctgctttgtcccccccaccgcctcactttccctcttcttgatggttgtgtcacccttctgaagaaggccctctcatccaggctggtccttttcttccccttctatttcacctccccgtgatcgttttgactccaaaaaagtcatgtccaatgtcgatatatccaatgatggcctgattggcgtcgagtacgactccagaggctatcttcagcatcaatcatggcctataacgttagatcaagcgccccaacggtcagaagaggtccatggtctttccccattgcaaactggcggtcaccctctagaacagtcggtgacccaggacccaaatctcatggtggattggcactttcaaccgctacacacccctcatcaccaccatcacctctcatattcctccgaagacccctcctcggcgtcccagtattccactagttatggcatgcccatgcagtcttcccccgtcgatctcatgtcggcacagggccagatgagcgccggcttgctcgatggtccttatctgccgatgtctgcgccggtcgacatggtccccttctcgtatcaggacttccagacggatttgatgacgttccccaacggacttccggaagtttatgcccctcactccgttcttgaaagcagctcgcccaccgatacttatctggaggtccgttctctgtccagcagcgacaacggttggagtactatcgaccaccgtcgctctctcgattttggttttcccgaacaaggtgttttcgtcaaccctacccagacactgcacgatcgcagcctttcagagtcttcttactccacatcatacggcagctttgtggatatcacaaatccgatcggttctcccggttctgagaacaatatggatttgccttgctataatcaccatggccacgggcatagtcatagtcatagccatactcacagctacaaccacagccatagtcacagtcacagcagctccattggaatgcacggtaattccccgacaagcagcgcaatcgtcctccatagccagtcttcgccaggctctcgctcgccttctgcagtcagccccatcggcatggtgcgacccatcccggtcccactcaagaaatcgacctccccggcccgatcagctggatcttcgcaggtatctgcctcaccgccgagccgcaaaccgtcccgcaagagccccattgccgccaaaaccgccgagaccaaggttcgcaagcagtcccaaactggcaagcccgagaccgaaaagcgtgttggcaagagaaagggtcccctcaagcccgaccagcgccgacaggctagcgagatacggaagttgcgcgcgtgtctgcgctgcaagttcctcaagaagacgtgtgacaagggcgaaccttgcgcaggatgccaaccctcgcacgcccggttatggcaggtgccatgtactcgcattgatatcaaggaaattgggtatttcatgaaggactggaaggcagattacgaacgccacatcactatgggcttctctgtcggtaacattactggattctcggaccaagaacgcactctgttcatcacccacggttatggacagatcctgcccatcaatgctcgcgaggtctatgtccgggacgagcagtgcttcaccgttgactggatggagtcgatgcaccgggatccaacacaatatgaggtcgagactgccaaattatccgctggtatggagggcatctcgcacgcgatgctgtctgattaccttgaccgccacatcgacggcaatggcacatttgagaagttcgtcgatgattacttcgagggcactcctttcctgacgcaaatgctgaagaccgcctttcgcttctacttccgcactaagctgcccgttatccgaaaggcactcaagctggtggttgcttacaaccttaccatgcatgtcaccatggtcgaaggcattggtgaggaggaaggtttcctcggcaagatcgagagcatgggctccaagttctccggcaagaccatggcccccgtcatgatcaacttccagattaaatgtgccatggctagcatgtggcgtgagctgcagaaggatgtgctggaggagctgtcagcactctattcaagtgtgtacagcggcgacaagctgaagaactggccgacaatcttcatcttggcctccattctgctggccgtgtgggaggagatgcagttcgacagccactaccgcacaccagacgcggctgccgtcgacaagttctgcaccgacatggaaaccaccccggtgggcgtcatcgtcggactgttccaggccatctcacagaagctgcccccgttcaccgagtgggattcacaaaagcaccaccagctgttgtactccaacccagatgtttgcaacaccatgactgaagtccgccaacatgtcgagcaacatggtaagccacacactctccccgatcttcgacttcgatctccgaaactaaccccgtcttgcagaaacctaccttcgcagccgcactggcacgaaattcaaccgtggcgacttcgactgcctttcaaataaatttgtgtcgcgactggtcattcgcgccaactagacaacgaccccgatgcgcaaacgcattatgatgatgatatttaccacgactaccgtttccagcagcgagtactgttctgcgattgcgttttgaatgctcaatgttaacactgagaacatgcgaaccaatgttgtaacgatgcgagcgcacttccactctttaacgaagaatccgacgggcccccctcccagcgaggttctgccctttatttgttccgagcgaaccgactttcttttgatccagtcttttatgagccttgttttttttggttttgtcttttgtcatatttacctctttatttttccttgatcataagtcttttttttgaactttcttgtttgacttttttgctcttgtctttggtgtacacctttcttcgcatagctttgtctccagcgatgaacgaggatcacgaatgtcatgaccgtgtacggccgaattgtttctattgttttgttttcatttttgtggcacctggcacccgtcactgaacaggccaacaattcaagttaaaacagggccctgagcacggtgtacaggctgtcttatccccgaactatcacattctttgtggtggttgacgcatatcttcttgccggggaaaggggcgtcggaaggatatttgcggaagcgttctgtttatacattgcgggctttatgctctatatcttgatagtcttttaacttgaattctcatttttttccagattcttgttgatcgaactataaaaagacgaacaagacggtgaacccggatccggctctgatactaagtttggaagcgggtactgggtacccgggagacctcagcagttgccgtgtacagccccgtaccctgtactttctgatcactagcgtctccataataggtccaccccctcttttggcgataagcaattcaacgtcatcacttcgggatctggaggacaaaggggacttgagggatatgaggcgatataagagacctcaacagccttggaagattatagaattttaataatgttaagaatagtctatctgtaggtcatatccaatcaaatataggttggtttcgcaagtggcgtctatgctcaggcaccccgtttgactcatccggcatcttctggcattttcatgggcgtcacctgcgcctgactaagacacctcgccccctcatccttccaaggttccctacataaggacactgtttcccctcttcgaccttttcccttctttcaatctaccattacccacagctcgcttcacacctgagcaaccctctcttcaaatcaacgtcccaaataataagcccatcatgcagatcttcgtcaagactcgtacgttcacacccccttatcgagagataaccgcctggatcccactggccctctcgcactcaactcatggacatccttgctaacacccctttgtctatagtcactggcaagaccatcacccttgaggttgagtccagcgataccatcgacaatgtcaagtcaaagatccaggacaaggagggcattcccccggaccagcagcgtttgatctttgccggaaagcagctcgaggacggtcgcacactgtccgactataacatccagaaggagtccactctccatctggtccttcgcctccgtggcggtatgcaaatttgtatgtgttgactgccttcacgtcctcgtcgttttctctcgactaacatttgccacagtcgtcaagaccctgaccggaaagaccattacccttgaggttgagtctagcgataccatcgacaacgtgaagtcaaagatccaggacaaggagggcattccccctgaccagcagcgacttatctttgccggcaagcagctggaggacggtcgtaccctgtccgactataacatccagaaagagtccactctacacttggtcctccgtctccgtggtggtatgcagattttcgtcaagacgctcaccggcaagactatcacacttgaagtcgagtcatccgatactatcgataatgtgaagtccaagattcaagataaggagggcattccccctgaccagcaacgtctcatctttgccggaaagcagcttgaggatggtcgcacactttccgattacaacatccagaaggaatccacactccaccttgtcctccgtctacgtggtggtatgcaaatctttgtcaagactttgaccggaaagactatcacactagaggtggagagctcagacaccatcgacaacgtcaagagcaagattcaggacaaggagggtattcctcctgaccagcagcgtcttatcttcgctggtaagcagctggaggatggccgtactctttcggactacaacatccagaaggagagcactctgcacctggtgttgcgtctgcgtggtggccagtaattgacttacgattctttttcccaacttcgataggttttacatgacctgcatggcgtttagtcggtttttcgaggctgaggcttcttttcttgcaatgtgtttcctgaggacggcttctctcttttactctgcccaccttatcatcattgatatatgatagatagttctcgtcaattcactctagcaatatttgctagtctttatgccatttcattgtattgcacttgtagggtaatactaattcttgactggaattgaaatggtacataaaatgttaccgaaatagatatccttccagcatattattacacctatcttcataggcaattctattcaaccacaccatttctcgccaccttgcgttctagccagagcacgcttcagactctcaatcccttttttgcctctttgccactcgcgtgccaggaaccacttgtggcgtatggcgcagaagcgggcgacagtaaaatattaagtaatcatgcattctttatcgtgataacgacttcctctttcaacgagttccaaccacaatcgcaagctccagaggatgcgagctatcgtccgggatgcccgcttacttttatcaccttagcttgcaactcctctctcacagcccgtctgacgcgccaagctctcagggttcctcctctctcgcgctacaatccgcatgggaagctctccaacctttccaaaaacggagccggtcttcaacctccaaccgcctatcacccgcgggagataatcaaaccctattatcattagaacacactttggcgcatcgccagatatccaccctctccacccgcacaactatcccaccccgcccttcctccgccagcacttcttgcgactccaacaacccctccactagctcctcaaccagcacccaatctcttgaagacgacaagcgcttcggtgccgtctcgatcgagtgcattgacatggtcactccaaagcacccgccgaaacgcacttcgaagcgtggctccgtatctaccacagaaccagagaacctcgtcgcagcaggcatcggcacggatatcctaggcggcctccgtacgaaaggccgatatataccactcgactacgaccttgccgacagcgtctggggaattgtacatctgtaccgcgatttgcaggagacgccttacctcggaaacgatgacgagtaccccgcctatctgaagggctcctcagctgcggcccgccaacccggagagcagcaggcaacgttgaggcagggtctgaccggtacggcgggtggtcaacattctggagcggcgggtcttgcagaatatccttttcctgaaacaagttcctccactacacagagtcctgacgaggattgtacgacactatgtattctcgctgtgccatcttatctgtcgccgccggactttttgggctttatgggacagaagaccatggatgatgttagtcatttccggatgattaggactgcgcgtgcgaatcgatatatggtcttgatgaagtttcggagtgggcggaaggcgaaggaatggcagaaggaatggaatgggcatgtgttcaatagcattgagcctgagacctgtcatgtggtgtttgtgaagacggtcgaaatccaagtcgtggatgccggaacaccatctactgagcacggcgctctctctaacatcccgaccccttctcgagcacctgtatcatctaccggacaagcaactctcaccggcaagcctctcgcgccacccacccctgcactaatcgaactaccaacctgccccgtctgcctagagcgaatggacgaaactacggggcttctcacaataaactgccaacacgtcttccactgcacctgtctccagaaatggaaaggcagcggctgtcccgtatgccgatacacacaagatgactaccgcaaaagcaatgcatccctgaaaccagacgaagaaccccaacaatgcagcatctgtcactcagaagaaaatctctgggcctgtctcatctgcggcacgatcggttgcggccgctacgacaacgcacacgccttctcccactggaaagaaacagcccacgccttctccatggacctcacctcccagcgcgtatgggactatgtaggcgacgcatatgtccatcgcatcatccaaaacaaaacagacggcaagcttctcgagctacccgctgcagactacagcgccctagacccaccggactggggcgatgccgtcccccgcgagaaactagaaaacatgagtatcgaatacacacaccttctcaccagccagcttgaaagccagcgcgcgtacttcgaagaaatcgtcgagcgcgccgtcgacaaggcatcgcaggctagtgctgccgccgccgtggcggaagtcaatgcttctaacgcctcgtcgcgtctggaagaattacaagacaagtatgatgtcatgacgattgagacgctgccgtcgcttgaacacgaccgcgcacgcgccgagaaaagagcagaaaaattcgaggccctggctcgctcgtttgagaaaggattccaagaggagaaggccatgaataggaacatgttgttaaaattggagggtcttgctaaagaggttgatgggcttaaggctgcaaacgcggatcttgcggagcagaatcgcgatttgacgttctttatcagcggcacgcagaggttgcaaggccagggtgaggaagttgagcaagggactgtttctgtgcctgagccgtcggctgcttcgaaaaagaagaggaaggggaaggggaagaagtagtttgggcgttggagaagttttgcatttgcttttgctgttttaataggtgtacggttgggtggtgttacttttgctcgggattgggagtgaacggtgtccttgggtattctcttgctgtgtccctaatagggacatggttggttatatgcatttagcgaggtgtactgagtatgctatagaaacgagtgaacgaatacgaatttatgaaatacattcgatctgcaatgagtacaacaatcaaataatatacaaacagctcataaaaatgcaagtatagatacataacctcccccaaaatcatctaaacccccttcctgacagcccagaaataattcccccaatcctcactaccaggcaccatcttccacccaatcccaggaacataaacagcacccacacacttccacctcatcccctccgcaatcgcacttccgcccttcgaaacacccgtatcagcagccctcatcaacccctcctgcaaccaccccttgacctcatccgggttaacaaacttactccactcatgcgtcccccgcggcacaacaccaatcggccacggcgcttcggcaataacctggttcaagatgaacgacggcagcgtccgcgagatagtagacccaatcagccagccgccgggcttgagcgcgcgcaggcagtttgtcaggaagctgagcggtgttgaggtcttcgggtcgatgtgttcgagcacttcgaagagggtcacaatgtcatattgtgggggggtgggtttgacttcggagctgggatttggtggagtcgaagcgggagttgaagtattagcgttgccggcgagtacatcctccagcgtcgtgttgaggtacttgaagcgacctgtgcgcaggtgcgaatcgacggtcggatccaggcgcgcgtgctcgcgcgccatttggattaggtccgttgaggggtcaattgcggtcattgaggcggctagggttggggttggggctggggcggtggggtcgagtgggattgtgcgtgcgagggactcggcgaagatgccgccgccgcagcctacgtcgaggtagttgagggttgcggtggagctggttgggtctggtgatggggttccttctgctaggcaggaggcgatgaattcgtggcggagggggttcattaggtgcaggattcgggaggggcccattgggtcccaccaggagctggcgagggaggagaagtgggagagttcatcggcggagacggaggatgttgagtgcgcgcgggttgggtgtgtttgagttgatggggcggatgcgggcgcggataggaagtggtttagtgagggccttgttgagcggatggttgagcggagggctcggactgagagagggagggtacggggtcggagggaagccattttgtaggtaatggtgttggttttgggcgaggttgaggttcaatggagaattggctccggtgctctactgagctttaattgatgcggagacccgaggattatctgtgggaattgttagctgaggactttagagggatatgagaaacaatagagagcataccactaagaatatcctgagcaattgagaagagtcttggagaaagcccatgaagctgatcaccaaattggagattcaatgccgaggcaaacatgccaagacaatttggctgctgtttgagcttcctttatggccatggatttgatagttctatgattcagtcatgcctccataaacaaccatctattaaataaactccacttggtatcacaaaacaaataattcgcatcacaaattcaatacaccatcatcccaagagacaatcttcaaaacctagctcctgcggcacatgcggaagagctgactcggcttggccatcgacatcatggatctcaatatcctcggcactagtagcgtaatcccagacattctggcctgaccatgaagccaactgatctggaacagcagcgccgagtataggaaggaaattccctgtggtgatgttgcagtcgagtccaagcacggttctgcaacgatccagcaatattgggaagagatacgaaggcgagccacgaatttgagaaagtgtgtgaagtataccccacagtaactcgttcgggtcaatagtcgactcagccagtctatggacggctttcggtccaagagatctcgtcacatcggcgacagaggatcctagatcaaagagcttttgttcctatatcatccaaatcagtatacaacaaaagactccatctcggattgacctaccatgccaatcccatgcgcatcaacagctccctgcgatgcagcaccaatcacgctcatcatagatttactcaccattactagtaggtgaaatagcaaaactgcgtcatcgtgtgagccaggctgtgtggcatggcttatagacagcttctacatcatcgtctgcagccactgttgcgtgatcaagatatcaacctgttggacctcaaggactccctctagggaaatagccttgcacaggctggattggatggcggagattggcggcctctctaaaattccatctccgctaccagcggagatccaatcataaaggttcggggtgagattctcaaagatgttgatcaggttgataaatccgtacgccaggataggatcttccgagcaaagaacctgaggcttgtgaatagagctgcgcagcataactggtttcgcttgctggagagcataacctctgccggtttacaaatcagccccagtccaaacctcattgatcctgcataagcagcgcacttacctctctgtgataaacaaaagccagaacacacgccgtctttcctccgcttcttcaaccccatactctgcatatgtcgactcgcgatgcaacctaagcgtaaatgcaaacgaggtagcctggcacaaaaagaaccaagcctgatcctgacgatcaagattcccgtataaggcaaacaaaaagaacgaagtcagaagtgactccgtgctaagtgcttccagaagatcacaatcccgccgcgcccgcacagcctccgcaagaagttcttccccagacatcaacgagtgtccacccccaaaactctgcaaacgcgcaggatccggtatatgtgttgctccgtccaatttcaactggatatgcgtagccgcacacagcgacactaaaagagcataccgctgcgtcgacagctgcccgggccgatggcaatctagccggagctggtccccgcggatcacgggcataatggggaacaaatacttgaggtagatattgacgtggacgagcaggatctgcggcgagagacggcgatcggccggcctcgcatagttgtaaccataaccaattgcagattcgacggttgagtccgtggagcccggggataagacgagttccgggggcggcagatgagaaaaagtgtccgagaagtcctggcctgcgaactgtgagtccgcgattccaaattctggcgagatgggcgagttgaattggtagtccgggatctcgccggtgccggcatcctcgggatatatatgctcgggagggtcttgtcgggatgagagagggtgaatcggggctaggggatatagggtgcggaatttggggcctttccgacggaggacgtcgctgtaggagcaggacagaagtagccgtttgcatttgtcgcatggtagttcacgggaacattttatttttcggcggcgacagttgtcgcatgcttgttttggcttgggttgcttggaggacattgttaaattgctgctaggtctcgactagacgcgggagagttgaaatttcatgttcaggtggaaatatatattaaaaaaagttgcgatggtttcatccggggagttcggcataacccccattataataaaaaaacaatgcaaacctggggaagcgggggagggcaaggaacagtgagaaaccccgcaaaggcccctgcgttagtattgtgcctcatattttgatcttattcgcattggcgtccttagggatatggcgattctcgctgctcttctagattaagggtgcatttcctctcggcccgacttctctctacgtctacgtacatactcccagcctccgaactataaagaatagacagaagaccaccatggggccaccatgaaaatctactcagtgacccctcattccagatattgttacgacttctaatattaacatggatcccagacctcggaccgtaagcgaagtacatatgtacgcctttgaccaggtacggggttacggccaagtcgggtttgatgcctgactttatggcgctgattgacatgtgcactaaatcgaagatgagggatttcttgccctggttaactggtttaatatagagtgggcaccgctaggccgcgctgagtatccatctccacttagaaagttgatattcgatccaatcaattttctcacagcatcaactgtttatggatagcttttgaactgtacggagtacggaataccgagatggatctctcttatatcgtcctcggcttcccgaaagtgcaaaaaggccttatctccttctatgttggatatcatgtaaggggttgaagcgcatggttccgctatggtttgtatgctttgtacagcttagacgaggtgggactgttgaccagttgaataatgttcctgcgagggtcccgaggttccagacttactccatccttgcgcaccttgtagttataagattatccactagagagaaaaggctcaccgcagcttgccataaggaggattatacgaagcacctaaccttggaagatcataatgatgacattataatatgtaagcaggtttctatacattaattccaggttcttgtattattctgtagccgtactactgtagacgggcatttatcggacaactggccaatcaccaccctggaatgacatggtcaattgtgatcggcggtctttatacaacacaggatggtccggagtaactatcttcctaggcaagtgatatcacattcacagtaccatttcgaattctgccacttgttggtctttggcatgggaatctagagagagatatacctcttcgagcagactctggattgcttttatgatatttgaatatcatataaacatggtctaaaatgcccatgcccctcttttgtgaatcgcaggtaggtaatacggtgtcgggtcgacgtaagggtccacattcaacccagagcccagccttctttagcgcttgaagcttaaccaaccccgcaaaaacattcagccacaaggcaaagtatgtgattgtggagaatcaacggaaactcggccacggcatatcatcgggccgcaacttcctgtacacttgcagtgctataactaactggctacgctcattataaaaacgagctggcatgaaaatagccccggtcgactactagactagcgaagtggttattatggttagcgcgaagaagcttcttggctgtgcttgcctcttgccagcagcctatggtggttacttaaaatccgcccctacggccccagcctctcactctgacattgcttcttcaacttcttcgggaaaatacacacagtttaccattcccgctagcgcagatgttggcgtacagcagatcgccaatattgatgaccccgaagccgtcgatgcgcagtcggtttgtcccgggtacaaggcatcgaacatcaaggaatctgctcgtggattgaccgctaccctgacgctagccggaaagccatgcaatgtatacggaaccgatgttgactcgctgaacttttccatcgagtacctcgccaataatcgtctcaacgtccaggttgtcccgacttatctcgattcttctaactattcgtggttcatgttggatgagcatgtcgttccccgacccacttccgacccttatgcttcaaagacgcatagtgatcttgagatcacctggtcgaataagccatccttccatttcaaagtgacccgcaaggctacccgtgatgtcatcttcgataccactggttcagtcttggtatttgaggaccagtttgttgagtttgttacttccttgcctaaagattataatttgtatggcattggagagcacatccagcagctgcgcctcttgaataatctcacattgactctctatgcgtcggatattgctgaccctattaatgagtgagtcacatttcccaaatatatatttcccctcaattgtactgctctttgtttctgactacttttatacagcaatatttacggctcccatcctttctatctagacactcgctactatgaggttgacaacgagggtcaccatatcctcgttgcaagtgataaggccgatccgtctaaagactatgtttccttctcgcacggtgtcttctctagaaatgcccacggctaggagatcgtcatgaaccctgagggcctgaagtggcgtaccctgggaggtagcattgatctcactttctactctggtcctagctaagcggatgtgaccaagaactaccagttgagcaccatcggcttgccagcattgcagcagtacttcacttttggcttctaccagtgccgctggggttacaataactggacggaacttgaacaagttgtctccaactttgaaaagtttgaaatcccgctcgagactatctggtaaattgactcatcgtgccttttaatggttcaagtcctaacatgactaggaatgacattgattatatgcatggttaccgcgacttcgacaatgatcaatatcgttatccctaccgtgagggtgaggtgttcctagataagttgcaccgcagtggccgtcattatgttcccattatagattcggctatctacattccaaaccccaataatgcctccgatgcgtaagttcccctatgtctgttcttcagaagcaaagctgatttatattcagctatgatacctacacccgcggacacaaagatgacgtcttcctgaagaatcccgatgtaagtgagtacatcggcgctgtctggcccggctacactgtcttccccgactggcacaatcctaagacaggcgatttctgggcgaacgaaatcgttacctggaacaagaaaatagccattgatggcatctggattgatatgagtgaggtttcttccttctgcgttggtagctgcggatctggaaatcttagcatgaacccagcgcacccctcgttctccctgcccggagagcctggcaacgtgatctatgactatccggaagggtttgggctcagaaacaagacagaggctgcatctgcgtctgcagcgtcatctagccaggctgctgctgccgaaactggcagttctacctcttcgtccatctcttatctgcggaccacacccactgcgggagtacgcaatatcaactacccgccatatgtgatcaatcatgaccaagatggccacgacctcagctcgcacgctgtgtctccaaatgccactcactccgatggcgtccaagaatatgacgttcacagcctcttcggccaccaaatcctcaacgccacttatcatagcctgctgaaggtcgatgaaaagaagcgacccttcatcatcggccgctcaacattcgcaggctccggtaaatgggccggccactggggtggtgacaatgcctctaagtgggcatatatgtttttctctatcccataagccctgtcattctccctcttcggaatccctatgttcggagtcgacacttgcggcttcaacggcaacaccgacgaagaactctgcaaccgctggatgtaactatcagccttcttccccttctaccgcaaccacaacaccctctccgcaattcctcaagagccctatatctgggaatctgtcacggccgctaccaaatccgccatggagatccgctacgcaattctcccctacttctacaccctcttccacgaagcccacaccactggctccaccgtcatgcgcgccctggcctgggagttccccacagacccctccctcgccgcagttgacacccaatttctcctcggcccctcaatcatggtcatccccgtactcgcgccgcaagccatctctgtcaagggcattttcccaggcctcaagcacggtgaggtatggtacgattggtacactcagaccgccgtggacgcaaagccaggtattaacactactatccccgctccgctcgggcatatcccggttttcgtgcgtggaggcagcgtcttgccgatgtaggagccggctttgactaccaaggaggcgcgtgccacgccctggtctttgcttgttgctctcggcggcagtggagctgcctctgggaagttatatctcgatgacggagagagcaatgttccggatgacacgcttgatgttactttcaaggtcaaggggtccagcttgagtgccaaggcaaaaggtaactgggaggagccgaatcctctcgctactgttactgttctcggtgtttccaagaaacctggcactgttagacttaacggtatgcctgtcccagcttctggtgtggaatacaatgctacatcacatgtgttgtgtgtttgtggtttgcaggagttgaccaaggagggtgctttcagtgggaactggactttgaagtggtagatggtggaatctttcaagagaatgtagaattgtgtcttttattgtgcgaatctgctgtcttttctatagtctatcctaatggcaatcacattcatttattcatccctcgacacactggacaatccttacacaatggacttgtttcaagtttagtacataccctctccgttcgcaatatcttccgattgttccgggctccttattatcaaaagaccgagcgcctattgttatagtgccggcgactccgtaagctcattcagctgagtagagagacaccacacccccgcggtcgcattaacaaataggctgttcaataatccacagattctgtcgggccgacttatgaagcctatatatattttgatcgcatttcacgctataatatactcacattgtctctatgcatacggagtataagccttaaccatcctagcagcatcgcctaggccaatagcatcccgagtaaaccccgagttcatgagatcgacatcatctcaaacgagccgacaagccactgcaaccccatctccgccccccgcgtccctgcaaatttgggctccaagtccctgcgcacgctgattcgatcaacgcccgcgtcaggggcttcaacagggattgtttaatttcgcacatgccatgcgctagccttgtaatccgggctaataatttcaaggttatgcatgcattcttgtgactttgcttttttttccggcagggctggggacctgacgaattatatgtgaaggatgactatgggatttttgttttgggagatgatctttcaattaatcacggagttcttgaccatatgaagttagcagctctctctctctccttttctagtttcatcttggatatggctgtggctagggacgggcatttagagggatttacttctgatttaagtggaagcatctgtgaagatcttcgtctaagcttttagcgtctattggtttaagttatactccttctcggagtccgatttcgagagttattggcctccggtagttctatttgtctgtcgctgtatgcacggcttttgatagaatatttatatgaagtcccttgcagcgctttttgttggaatatcccgttgctgaacgattttactctctttccacattgattatcagcgctgaagatggttctcgcacgatttgcttggcttgctagcttgattagcattgccattgctgccactccagatgaatggcgctcacggtcgatctacttcatgctcactgatcgattcgcccgaacggatggttcaactactgccacctgtgataccagtgatagagtcggtttctgtctatatatcggctatgtgacaatgagatagagctaaccgtactcgctggatagaaatactgtggcggaacctggcaaggaattatagacaaggtcagtaatactctaatattacctatatcatcaagctgatcgattgcttagctggactacatccaaggaatgggcttcacggccatttggatcactcccgtgactggccaattgaccgaggatactgcgtatggctatgcctatcacggatactggcagcaggacatgtgggtatcgcaaaacagaaaagacagcccttgagacctgcatgcttacagaccctagctatgctctcaactcgaactatggaactgcagacgatctcaaggctctcgctacggctttacatgaacgcgatatgtatctcatggtcgatgtagtagcaaaccacatggtgagttaatgcatccatgtccccaatcatgcgggctgaaactgatatgtattggataaaaagggctacgatggcgcaggcactgacgtagactacaccaaattcaaccccttcaacgatgcgaagtatttccacccctactgctcaatcgccgattacagcaacgataccatggtgcaagactgctggcttggggatgacaatgtttcgctaccggatctggatacagagagcaccgaggtgcaggacatatggtatgactgggttggatctttggtctctaactactcgagtaagttgtcttctccaatcctcacttcggcaagatatatcgccatatccgaaaactaactggtatatagtcgacggtctccgcgttgacacagtcagacacgtccagaaagatttctggcccggctataataaagccgccggcgtctactgcgtaggcgaggtctttgatagtgacgctgattatacctgtccataccaggaggtaatggacggagtgctcaactatccaatgtgcgaccccgcttgtccatggaatttaccagatacacagaggaaactaaaagctaattgaaaatagttactacccactcctcaatgcctttcaatcgacctctggaagcatgaccgacctatacaacatgataaatacggtgaaatcgacttgcaaggactcaacccttctcgggagctttgtggagaatcatgataaccctcgttttgcctcgtaagtgaaaactcaattagaccaccggaaactccattctttatgtctagaagctaatatctctccttccgaaacccagcgtcaccgacgacattgccctcgctaagaacgcagtcacattcactattatggcagacggcattcctatcgtctacgccgggcaggagcaacactacaatggtggcgaagacccagctaatcgcgaggctgtatggttgtccgggttcaacaccgacagcgaactgtacaagcttattgcaacggccaatgctgcgagaaaccaggcgattgctaaaagtaccaactatactatttaccaggtatatgcttgtctctatgtctgtcgaaaggaaggaataagagaatgtaaatggctaactcagtcttgacagaactacccaatctacaaagacgataccaccatcgccatgcggaagggctttgacggcggacaaataatcactgtattgagcaatctcggtgcaggaggtgcagagtactcggcttcaattcctgatactggattcgcagctggtgaggagttgacggaggttgtgtcctgcgctagtgttactgccggtgatagtggggaggtgtctgttgctatggtgggtggagagcccaggattttactgcctacctctttacttaagggctcaactctgtgttcgtcgtagatctcgtgttcggggtattggtggtcgactcgaggctcaactacccgcctgtgatatatgtttcttttaatcaccatctatagttattgtgcttcgttggcaaaggggaatgcgtctaatgacttgattggtgcttttgtacttaccttggaaggattcatgaagtttgtatcatattatgttgatttggtgtttacatcgtagcgatgatagtgaattctgaaaaccgaatggagaatggagaatgtattgtaatagttgctaaatgaatccagccatagataagattcactataatgaataaaactacgaaacgaagaatcctcgaacaagtcatgactattttcattcaggtgtgcttttgctgttacgatcctgcgccagaaaaaacacaacacccaaatcccaaatctaacctcgatatcaacctaacatacaccaactccaatgatctagaaccaaaaggccaagcccacaatcccatcaccaatcatgtaatgccctcggcaccagaccaataggcatagccccaccagtcacaccagtcggaggagaatgatgaaacaaatccggagcttcaaacgcaggctgcggagccgcatacccaggcatcatctgctcaagacagttatacccctcaacaagggaatccaagccctcggagctagacataagctgcgagatatccatgccggtacgatgatggctcgacggaccgaacatctgcatgctcttaacctccgcaaccggggacgacgaatgcgaccccgcggtaacaacactcgcctccgagtaccgccgctgcacttcgccgacaatacacgcgatccggtaggagaggttgttaccgccgggggcgaggtgcagtaggaagccgcggacttggctgattagcgggttggtgagcgtgtagtcgtagagcgtgagcgcggcgtagccgacgatgaagtagacgtggtcgattaaggcgggtgcggaggtgaagcgcgtttggaggaattgggttatgattaggcgggcggtgccgcatatttctggaacgaggcgctcgctgtccggttggaggcgggcgactgttcggtagaggaggagttggcagaaccagagacttaggttgagtgttaagtcttcgctggtggctgtaggggtgtgtgttagattgagattggatttgatgtgcatatagggttgatgtacttagaagatgtgcccattccaatttccagcgctccaattcttcgtattcgggttctgcgaatcggagacggtgctggttgtgttgaagtcggagggcgatgcggtatagttggatttctgcgataattctcccgtcttctggtgtggcggctgcatattctaggattcgggggcattggtcgatgtattgttgttggatattaacggtacggccatttgcgagggcagagctattgggttattagatcgtatatccgacggttttaatggacagaacatactgtagctgggttgcgcagagtgtattccacagacgcaactgggcaagtagctcgtctggatttaaacgatctcctggcaaggtattcaggaagttaaatgagataagcgcatggttgattgagatcccgctcagcaaccagtcgtccatgagtccttctttgtgaatggaagtagagtatagacagagcaatgtcaacgcctgcagcatatcgcttgttatgggcgggggcttccacagcaccttcgccacggcatgttgtacacaaagtgagatatcgcggacagtgtattgtggtaggccaggcagatagcgcgaagccaagagacatgcggtgttgaagaggagtgtatttgaccgttgaatgctggacggatgatttattgagacccaatggccgaaatattcgacaaaactagcaagatgattagcggagaattccagtggcaaacacacaatcaaacacacagttcaatcaatttcatagaaagcttggaatctacgatgccctgggtgacgatatctccgagaatgtcggcatctgataattgatctctctcgccgaagcattcggcttacaggtctcgaatgagttgcgctagcttgagcggatagaaagatgaggacatgctatcgcttaaagatattccatctatgctgtggtttctagtttgtaaggtggggctgcagggcatgctgggggagcggttcactatctgccgcatcagatgtatcatctcccccatacctcgttcgagagagacaagccgttcttcgatcgatggtatagcggtggcgttggaccaggttgatgcattgtcctagaaccgctctgttgtctccgggagctcgcaatccagcctgttatgacaataataatcagcatatggaaacgacagactccaaaaaagcaacagcatgaataaaaaggccaaacaaacctaagtgacaagcagcgacgacaagaatgaccacggggatcgacatcacagcgagtcttcagcttgcggcaggtattataagcagtcattgatcgtcggatgcgcccttttggcctcgcatcttgacacgcgaccgagtcaattcggctgctatcatccgggacaataggcttggtgtcccacgagataggattaattgtagggccggttctcgtcattgtattgggtgttggatggttactgtgggtattgaaggtatgtaggtactgtttaggggatcatctatgtatgatggaagaaagatgagaagttggagagtaggaagagaaggctgatcaacaattggacccttaaagcaaaagcccaaaatcagaaacctgaagatcatgtctatcagggagatccaagccttataatagcgggtcactagagcactagcccgggtgagggcttttagccaattgcgacaagaggccgattactgacgatatcgtagaatccgcgcaggtacatcccgttcatggcggattctagcggaccatggcggacctggggtaatcgaatatgcatccaccaatctgaaaacttcccgccggcttctagaaaggcagcgattgtcggtgcatactttgaggaggggttgataatgtcgtattaactcccctggcccagtttctccgacgagaaccgtaggagaggggggttggagtgggctgagtggcccgatctatactccatacgtccttttgcgtttgattcttgacttgttcgtcttatttcaccagtccgaggttatcgtgggatcctttcccttttccctatctaatgcaactccttctttgcgtatttgtcttgctcggggacttccgccataatcctgatctagacaaaggtctagcataagaagggcagaccttgtagtatgatttggcaatgcctctcgttaaattcgtcctaagtggggggaggttgaggatccaagtggggagggacaacaggcacacaacgataactcggcaataattggttagcatgtgcaatgtctcaaagggaaatggctatcaggcttggggatcgcagcaatgtcaccttgtaactttccaggcccgcttaacaacggctatcctgccatttaatacccttcttgtttagcctcgagatatggcatttccagccgtcctttggctgctttttgttggatctcataggcgaatcttgtttgccccgttctccattttaattctgttttagtttcagctaaatcaacagccagaggatggtatcatatcacattcatatcattgacagcgccgatcgcactgcaattaagatcaacctcaatcttctaagaatatatgttaacgtccttgatcggcctcgttaatcaaatttcaagaccagcccaggatgcaaccctagcaattgttccaatatatcctaaaattgctaatcgcgcaacgttgagtggcaatgcggaagaatatatattagtcgcccgcggagatcatccgaggcatctttttccctggctctgaatgatccaccctatccaagtgcaatataactttcatgcagaggaattactcccgaccgttccgattcttagtgctcttttgtcttggatgcgggaatcccggaccaagaagcggtcagtttaaattggttaatacgcgaataacgtactcctgatcaaatgctggattggacttgcttggctcattgaactctggggtaacagttggctggccaggtccacagccttgacaacgacctagccgacattttcacctcggcctggctcgttatcgggatccttgattaagccccattatgcgagctatatcgagtttattattaggtaaaattttgaatttagcgtaccggaatggcccgtcaagctatgcccagagatttagcgatgcgcctcgaacggctaagatgtgggttggaatcaccgacaagggtgtaggtataggtccagctttgataggaggtaaatagagtgctagacccagtgacaaatacaacatcaccacgatcgtcgcgttaatgcgctctcaacaatactgttatctctcaagttgggagaagcaaccctcgatgttgtagattctagaagatctttctacagaacgccgatcgcatcaacctgtctcgggtaatgatactgagaaagtatatcgctcgcttcttgacggcacagcaatgcagtggcaaaccttgagtcgcggcgcgcaagtggaaatcacaggaagccacaacccctcttactactctttatgagcgtgatgcatcgacgagggggtcaacaaggcaatacagtcagatcaagctgcccataccaatatctgattggctgacataaagtttcccccctattccttcttgcttctctgcatcttccttgcagggctgtctgactcctccaatgaacaattgccatgaaaccacgcgacttggatctaattttccgagagctcgcaagctaggcgactttcgatgcagacaaggttctcgacgtagttacttgcagggaataggtatgcatgctcagagataaggactatttgactactagatattcctatcttgtttagagacatgagctacgtgcacatctttgtgatgtagatctctcgacccgacccaccgtgtctaaagctagcgcacattatagctttttgtccaatgcactattctagttgtacactccgtttaacatagcatcccgatacggccaacatgcaatatatgtgccttgtttcacgtgcataagctttaagcttggacataatctccggatcgggatttccttgctagcattgacagaaggactcccgggatcctaggaaccccgggactccggtccctattatcgaccaagagtcgcaagagccgaagctttcatctagctctaaaagctccggggcgttttcaggctacccgcgggataagtcttgatttggaaattgagtttttgaatatgtacggagtatgtatgtatgtcgagaatatgtggatgcttgcagttgtttagattgcgtctccgcctgggtgcttaggaaaccgttgggttatgtctaactataacgtgcagtccacagtatacacgtgtacattgcagctgatgaggaatattgattaggagactcgcaattcatttaagatcgctgctttcacatgctcggcttaatttcccaatgctagtaccgtgcttcgatgcatttctttctacaagtcaccttgtatattaggcttttcgtcatttaactgcctgctgcgcgtgaccccttctctctgggactacgagcgtcctgtcttcctatttttctgttctcatcgtctccttgcaattttgctttgcttccctggcactgtcgtatatgacagactcggaaagaaaaaagagagcattgtcaggtatctccctagcaaaaatgcgatcgcaacaacatgttctaagcttttacgaagcctaagcaaaagaaaatccaaaaaagaagtgaccgacgcagggatcgaacctgcaatctcttgattcgtagtcaagcgccttgccattgggccagccggccttgttatggacagttgtgtggaaatgtgcgctataagcgaattcttgtgggacacgcttatgcccgcttagacccgcctattgcacacgtgactttgaatgagctgctacaaacatgtgatttgccaaatcaaggcttgtagagttgatattttgcgtctgattgagtaatactacgttcgataagtggcacggttttctggacgcgtttatcacttcttattataaactggattggttgcctcttgatccgattgtatactttgaccagtggtgaagatttttctatgaaaataagattaatgactgcgtgaatgttgacatatttctagctttatagaatgccaatgtggagttaaatagggtagaaatatatgatcaatgtatttaatgtgggttgttgttgttaattggaaatatatagatgagcgctatgttgaatatagtatacattcaaacaggtggaaacaatgctaagatgaggagctgccataacagccaaagctgaaagatgttctgtgtagatccaaaagaacgtgttcataaagaaattatcacggtaagtctaatagaagatgaaacttgcgtagaagacatgattgaaccctagttttggacatcatggaagatccaatgaaggacataaatgttaggtggccagatcccactactaaatagaatagctagtctcgtctttcctcccttttcctctcctccttgtccatcattatccatctcaatctacacctgtcactttctctcacgagacgttccacctagtagatctctatcaataaaccatttgccttctatattacacagtgtggtgccgcataacatgttgttcgaagcagttttgttcaacatacagtcgtaaagaaattctgacgtacgtataggtctgcataagagaagagatatgatcaaccaaagatgataattaactgtgtcagatggatggaagaagatgatctagctactgccatcaagctttctaaatatcttcatgtgaataaagttacaaaggtctcatcccaaagaacccagaagaaacatctctgcagccagataaagagactgccaacacaacaagctacccgtgagaagggaacaagaaagaaagggaggtctacaaactgcataggaatagtgaaagccctaaatacatcaaatttgtcttgaaagcaggaaaatggtatgagctatgcctcgttgttacaagagccagaagtagtaacagagcgatggtaaggtatattgagccaaaccaatacagccatttttcgaaaatagctttggcaaacgacaaccatcaagcccattatcacatagcccgagaataacaaaggtaggcacacgaatatgaaatttccaatagttttagatattcgatattgaaatcgtagtagcaaagtcaagatcaaaagaaagaataaaagagactaccgagacccgagtcctacaaacatagaatatctcacggttataccacaaattgcaaagggaagttatattctagtagcaggtgtttacgagcagaggtccagccgtctgaaattacccgccaagagaccaaggtatttatataggcaatccactagaatagagtcctctatcagaaggtaggccaaatgccacgcttgatactagagtagtctagcggtaattgtaagaactgtgcattgctgtgcctaaatgagatgcgcaggctcttgaataccttaggcgatatgcctgatacctgacatcttgtatatattttctcgtatttcttcatggcattacatgtgcagtacgcacgactaaggcctgaaaattgtgcataagaactagccaatgcacttatttactacttgcatccacccttgcagaactgtggcggctacaagagaatggtaacacacagatgaaggtgtgactacagatatcattttcgatatcacaagaggtgtgagtacatagcagcattcactgctagttgggattagtagttatatgcgccatgcaacgtaatcaagagtctatctacgtagggacctggacatgttaatcgcaaaatccagtttagaacgtggctagccataccctcatcgtaaacgaacaaacagtatagaatctagtggtacctagacagaatctatataagcccataatgatacctggctcatagcatcgaggaaagagttttcatacatcgtcgactcttgtagctactatctatctcgtctacgaagtataacctggttcacaaataaaaacagacccggacgacgatccttgaaaaatggagaatgcaagtgtcaaaaataccaccacggccagactaaacggcactattgatttgagtaattagtgtacagtgggtgggtttgccgatcattcatctggaaattaaagattcaaagtttggaagcttagacatgattaaaccaagatcatcgtagccggcctgtatgtagcgaggaaaataaaaataattatcaacaaataatatgccatgatccaaggtagatcaagggctgcctcaattttaattcccacttcaacgcgaggacgaccatccaatatgtgatcggattaaatcatatcacatattatactgctccgcgtactccgatccaatgattcaaagatgtatgaagtatggagtacaacacatgtgctcaggcatcgtccaagtcccacggagtatacggagtatacggtgagactcaagctcgcacgaacccatccatcgatctacacgcgatcgtcacaacccaaatcctgacatgagacagctcacgaaaatcaaagttgacacatcccatgggaacgagaaacacacatctcctccctcattaagcagggacgtcgttgggatcgacatgcacgttcccggtcgaggcccaaacgcccatgacagcgcagaagagaagacgcacacatacgtagcaagcgcctagcatgtatgtagggtgtacggagtaacggagcacagcacatgcatggtacttgcctatatagtcccaaggttgcatacttgcgcttgcacgcaacgaaatgtcagacgtcgatttcaccgctatatgacgggtcggatgcacgtatttggctactgaatggctaagtggggttgtatcgtcctcgcgaggaaatgagggtgaaaacggaatctgaaagcgtgaggtgcagcaacggggtttgcttgggcttcggttagcagataagtgacagggaggtccaaccgtaaggtagggagggggtgaaggtttccatggactgtgattcggtcgagatcgacgaaaagctgtaggctgtatgtatgtacgctgcacgactttgtcgagtgcgttttgttttagatcgacgagtcgtggtcgccggatatacggagtgctggatgctggggtttccaaggttgtgccagtggcttgcatatccgctgccccccctatgtgggactgggtcacggggttcgtatagtcttgtattttggacgtatagcatgcttgcttcttctagttttgctttttatgatgttgaggtacatcgtgcattctagatatggtcgcgtttgatatttattccctaatcttgtttctacccgccccttccccttttcattcgatgcgttggatatcacttttacaatatgagttctcagtcccctcactgacgtctccaatttagagctatgatggtagaacccacatcggatattgtacccaccgctgcaaagaagatggccgaagcccaagatcggcagtcaggtaagttttcggggtcatgtcaggaccccataattgtgttcttcgggcagctcgggaaatctaaaaacctccctaacagatctgtctactagttgtgttgtcggtacgatattttagtaatgcgatgtgattggaagagagttgcatctgtctcagttccaaccgcacttgattcagatatgtctcgatcggataaaagggccaataaataatattcagcatcccattattgcaaatgtttaatcatatgttcaaccccacatcgaaattaagtctggtatttattgcctcggggctgtcaaagggaaagaagtgccgaacataccccgggctcacgtggctggcacggagtaaaagtaaattccatgttattccagtgtcggcctttgacactgtgacttgcttcttccttattatagtagggtttggcagtgtagaattgtctacattgtaataagcccatgctacgtcgcactgtctgaacaattcttagagaagtgctacggggtttctacgacagcacagccagtcacgtgaccacatgacacgcgctagtcacgtggctacccgctactgctatttatgccaaagggggaaggagctgtgtctctattattaggtgtgtacgacgtcgatactggtaatataatggcagcatcaccgtattttgaattcatggcacggtggattgtagatatgtggactcaacggagggaccgaaaagctgaagtctaaatgagactccatgcagctgtcagttcacgtcatttggaatttattcacaaccttgaaagttaatacttcccacaattctagaaacgcaaaatccaatgcaacctcacctctcggtaaccgcgcggactgaactctaagcgctgccagaaagtcaaaaagaacagagaccgtggcaggaaccttgaaatgaggttgaggttcggtaacagaaggaaaagccaaaaatggggtcgatcttgacagcccgggtggagtacggagtacatgtactgttttagaataatatccactagtttacgagtctatcaatttggaattgattgaatgaatagtgcaaaccatggatcgcgtagccccagtctaaaaatcatgatttctctatcgaaatattttctgggtttagaagtagaaattgagagaaaaacaagttagagagatccaaatactttggatatctactccgtactttgcacacgtatccatatatgcatagagtaaatagaaagcaatctcagtccacaccggctcgcaataccgtggagatatcccccccgaagaaaaaaagtggtgccatgagtcgcaggtaaggcaagatccaggtttccacgggttgcgagccagactatggataggttagtcgcgatgatggagactaagtggagacgggttgcgcggtggacagctgagatctgctccgctccagtatctccgtgttgcttgacatttcagatcagtattggagcgatagaaccagagtataatggaaagtgaatgttatgatttgaaagtcgagtattcctctaaacgcctagtaatgcaattttcgcgggttttgtccagtggcactcatggaaatgcggtgtaacatggagggaaaaaacatgtagagcaaatcatagaaatggtgcgatggattgccaatgccataatttgccgtatacctcttgtgccggttgataataagttcccgcttggtaaacgcgaccaaagaaagggtatcaaaatataatgtctgaccaaagtctccgtaccggacggcaatgcgacatgtagagtgaactccagagacctggaaggtaaggaagaaagaaacaaagcaagacattaaaaaaaaacacatggaaaaagaaagtaaaaagccagtctatcaagctcgccgtatcctaccccgtgactcgtaaatggtagggagatataatataaaagcctcccagtcgtaaagtaaataaaacgctgacgttgcgaatgccgtgtaacgttgaagaatgaacagaaagagaaaaataaggccgtaatcgaagtcaaacccccagatgcaggttcatcgcactctagtgacgaggagagggaatgtgctcatcgacatcactaaaaggcgactgtcgttgagactccgtatccgcaccactgcgcatttggttccgcagcgcaggaagttgtcgtctccgagcattgataaaccagttactaatctgtccaaccaaagcattagcaagccataaagccaattaccagtccctagtcataaaagcactcacctgactgatcgaaagccccgtcctcgtcataaacatctgcttatcctcctcactgggataaggatgatcaagatgctcatggaaccaagcccgcagaatatccgtaacaggcttgggcaaattcccccgtctccgcttcgtcttaggatcaatcggatcacccataatcccgaaattcccctgcccatgccccatcatctgcggcgagatctgctcatcatacccgatagcaggatgtccgtacggcgactggggatgcatgatgggctgggtaaagtgctcgccgcggggatcagacatggctgccgtcggcgcgggctggcgatattcctgggcgatgaaggggtcggagcgtgggggccgctcagaatacccgctgctggcggacgggttcattgctcgaccgggcatggagtccaggtcgcggataggggggagaattgggctgggcccacgggatgcgttctcggatagatgcatgtggtggtggccgggatccggcatgcggggttggtggtctggcccgcgggagactgtgtattcgcggtgggattcgtaggggatttggttgggttggttgccatatgagattgagcgggggtcggccatttcgtggcttgagggtgggcggtcttgtgagtggcggggggtgtagaatggggaggtagattcgatttcatcgtggaggtgagcggggaggagctgagagaggttagatgttgattccatgttgtatttctaaaagcgctttagggtgatatcttacctctctgaatgaggggagggtttggtgagggtgtccggtcgacgactgggttgtatacgaaatagccatattggtatgttcgtctacctcatgggactgtgacatagacaaggtatttggggagggacaaggatagaagtgtccggatgagtttcacaatgtattacaaaatagaactatactcgacagttagaatggatatcagacgagtttgtagttcgaggcttcttcagcaaggtaaaagggaagaaggacgtatccaagaagcactcaccagggaaagcaggctgattttacgttgacatggtaaaataaaaaagagaaaggccaagattatatgcaaggttggggaatgagggtaaagatggaaatgcggtttctcaaataatgcagggccccgtacattatttcaaccaaaaaaaagtggccccgaaatctacattaaagtaaattcaaattaaattaaaataaaaagacatatccagctgttacatgtccatgggaaagtaagaacagggggggccgaaaaatgacgatcgtgggcttggtgggtacatgagtcggagagaccagcgctccgtgtgaagggcatgcggagcggagaagggggcgtaaatcaagagacaagtgcgggattcttaaggttgacagatagagtctttctttgagtctgtcaatggaatagtcttagcgtcaggatctatctcacgaactcctcccggttccatatagcgtaggttattgtaggagtcccgatgttgtgattggatgtttcggggtaaaggagtttgaggaatattgaaaatcgaataattaaattcaaaaagacgtggttcactagtgtacgtcaaattcgagatcccatgccaggccagtgcttataagcgggcagtattgccatttacatgagctggaaaagacaaggtccttgacacactaaggaagatggaacagtatacgattacggaggacttgaaagtacgaatgtataaaagaacaattaacagaaatatactccgtaccactacgtaggacaggttgcatgttcagacaggggcattcgtgcctgagtcaggccaagtgaagtatttgtctgtaattaatatattaaatcctcacctccactttgctttttctggggatttaagagattcagcactcggtacggactacggagtacggagtggttcgtggcgaaatcaaaaagggaacatccactaccatggaagaggaaataacaagcagaatcgagagcctttcgcgtaagacccaaaaagcgtcccaggtggatcttccagacaccgaatcgtaggaaaagatcgccgcttcaagcagaattgtcactggttccaaaaagatcgtgttccgagaagagcttaagccggtggggacgaaagacagacaggttctggatttagtttggacgaatcagaatccgcagaggtgacgcctcggatcgatcgtagattgcctgagcctctcatcggtgggcacggtggttgatcgaccaaccggaaagggagaggggctggtgctggcttacagggatagatcgcctaggggttcttcaatttgcatctccacttccttcgagagcttgtggcgtctagggcctttttttcggtctctttttggcatttctttcctgtcaccgtatgtcagatcaaggatcacccggagaacccgctttggtgttttccttttttttttcccccatcctgttttcacgatattatgcactgggctggtgagtgggtgttgatctgattggagtgaaaatacactcgcatatgatatctcccaggtgcgttgcattttagtcatttggattcgcatgtcaccgatcgtaaattgagatttgcgctaattaggactcgcgtatcgcgtccatacgatgtaatctggaccactatattctggagcagtttctcagcttgacacacacacggcactaacagacccgctctagcaactagtcacattctgagaattcaataatggcgcaaatctgtcatgtctggggatccctggactaagactaaatgcaagctgagtgtgctagtcagccaatcaacgcgggatgatggattcatctttttgggtgatttttgtgattgcacagcttcctaaaacaatctagaaagtaaactaaatgtactaaatgcaagactcatattgtgtcgtatatacatccaacccctattaacctgtcttcatctgacacccgagtctatttagttcaaagtttaataaaacctaacactgcagtcacctcgggccctaaggtaagtcctttgggcccagtcgatccacccatcaccaggaagatccctttcgaattaaataaattcaactatttcccgatcggaacggagcgcctcgaagctttggatctaccgagacttcactttgattcgccgttctgcagagatctggcatgaaaaatcggaactcgaaagtctaatttaatgaaagtctcaaaccgaggtcctccggactcagaaactaactaagaaacggagaaaaaagaaagaaattggcattctaaccgaccgtcatacctgccatgccctgagacccccattcacgagatcagagatcgtgcatgaaggaatgcagatcatcggatctcgcaggcaaccagggttgtccctggcgaaatgactgatctgaaatatggttattggtctaaagccgatccattagaggggagatagagagggtcgtttctctgcctcttgcatagtacggagaacggagtactatcggctcatatacctactccgtaccgtcggaggaattactccagattggtgggagcatataactacacatgcagtatttgtcatttccatttcccggttcttgggtctccggctattttattttattttatttctttttcccatttcggtctaaatttggctgtccaaccttatttgcatgattctgacatttgagcttccactttgtccattataaggattctaggtgtcattgccaagaattacttctagaaccaatttcctagcggcataaaactctgtagcatagtaacataataatacaaccttaggcatcccaaagggcccctctgcataaggccaacccgactacattggtactaactacatttctttcagcatgtaccctgtaggcctggacaattcagattgtttgctttttgcctgcccaaaacaacttagactcgtgtcaccggaggtgtatccatgcatgattccggtgtgccaagagtatagttcgtgatgaggccaccaatccttcgtcgccatgtaaggcgatattacttactcttttctctattggtccgatcaatactttactaatttacatgggtcttgctttttagaatgacgtaggtggggtcagaagtctcttgcttgaatgagttaggcacttaggcagtgcccggacttataattcctgtccccgtggagtagtatgacttgttgggtcgtttcgagggtgaaaggtaacgacaggagcccgggtgatcggtcggttatgcgtgagtgcctgactcgggactagagcctaccttgtttctttgtttgctttatgctcagttggcgtttgctacccttgtcggctaaattaaaattagaatcgacatctagcatcaccccgctcgattaggaaagactctaattatatgtgagatgtctacttcctgctacttcctaatgcagtatcattttcgttgagaatatatatcctcctgaatggttcaagccagaaggtcatgtacgagtatggagcagcgaggaagacatagcccactatcatatgtgagggatcgttttcgtacctccttcgatttggttcacaaggtcccagtttcggagacttagcaagactaatacaatttgagccacatgccaaacaaaagcgagggatacataaccgaagttcaagtgcttggattgtttcctatctaaagatgcacaaatgtggaattgcatctatatctgtcgtagtcgcaacaggaatttctgagcattcccacagcttcgaactgagagcgtcgctcacggtagtggaacttctttcggcttgcacttttgtgattactctgcgggcaattttctcctgttcaagcgtctccactagtcgtatgactctatttcgcatttagccctcgccatcggactgaagtctccagcctacgaagagtgaccccacagcgcatacccgagatattgcccggtttgttcctttgcctttccggttactgagcgcggcctgcgacatcgctgatatatctcgcttcgtctgatcaagcccaccagtgacatcaccaagtcctcccgatcgagatttcgcgcatatcccgtagtaaacatcgatgtgaacttgctgtagccaatttggaggcaaggagtgaacgtcgatatttcggttggctagtatcttttctcggttgacgtgggtagtcggtagagaaaggaacatgactggctcggtggctgatgtggacggcggcttcgccaggttattgtagggcacaagggtctcagcctaccaagcagcaattctaagctgccaaagggggataagaagcactgccgcacctcgacccctaccatgatatagcagtgtgactgttgacgccacaatgtataggaagatcatcgccgtcgacgtcttttgggcttctaaaaagaaggcgggaaagaggaggaagaatcaactgaatttttatttcgggatcctattatagtcccagaaagcaataaacaataaggtcttatctctgacctggagcaagcaccatatgatctcagcaacgtaaatttcgacctcgttgaagagcgataagtgtgttattagcatatctgcccaggactcatagcttgatactcaaggttctagtgtgcgtatcgaggcactttcggatcccgttcgactcgaaatttcatctagcacgtcccagagttgttgaccttcctgtgttgtgatatcagtaattataatgaggtctgggtgagcctcagatcgagtttgcacatcttggatggtggcttccacaatggagtaaaggagatcaagatgtgaagtattgggggttggagtcaaagcccttgcagaaattctgatgggaaggagttctgggtttattccgtgttgtgccattttgacagtaaggtgttgagaaagaaagtaggaaaaaattcattagatgacggatatgctaccgcctcatatatccagaagaaagatagccaataggagggcagcgattggtccataccatggttcacctgcgtagaccattgaatgcttaactttatttcttctatgtcacaggtatgatagattttaattgtatattcgactattatattgcctgaaggaaaggttttacaaattaaggagtactatgaagaaacggtagacaactcgacaattgtcaattgtcaattgtcttatcattataagaatacctcaatcaaatcgttgactttcacacaaggagatcaatcatagtccagcacagcagcgagggtgctagatactaaattaatgaagcttggggctgctcctgctgtggcacggagcaggacatcgctctcaccatgagttgctaggtcgcgcagccaactatccacactggcaacggatgtatcaatttgggagcgccattggtcataagtctcacactctgtgattgaggacacagcgttgattgcatcaatcaggggggagatgtagatcggtcgtgggcggtggctgcatggatggaggggctctggccgacacccttcaagcccaccatcgtaccaaaagctagggatacagacgggcaaatcaaacccggacgtatgaccctgcgcgcagatgagtcgtgggcggacgtacttccaataaccaggcccatggcgttttgatgtgtatgcatataagccgctcgctattgcgctcaatcccatcgcactaggagagcagatggtataccaacggagcgctgcaagaaaatgagtagcccaagctttgcccatatcgccattgagaaaaattgcggctcccctttggtccccagtcataccgtcataccctagatttggaatctgggccactgtctgcacgacgacagcaacatcgactactagcgtgccatcgcaagcgacaaaactgacgcctgctcgcagggccatcattgaatagaactcagagaagctagcctggtacccagtaggctggagattaccagcaccgcgggtcacgaaagtccacaaagtcgcgagaatatctgtctctgtatcggcagtgaacagcgatttagtagagccgagccaaggaatagtcgtgattggcggtgccctagcaccggaaacccgatcattgagccatgaacaccaggtgtccaaaattggtttgaccgaagaatgactggcgtaaaagtaccagagtcctccgaacataacggtagcaaacacgtattcagcactagaaacgatagacgatttaggaattgtcgggcggtccgtggcggtgtgtataaggttatccttggcgcccttgacagcgtttctcaagttaaaagccgacagcatgcagcttgaagctatctggcacaaatccttcggccccggggggcctgtcttcatattatcctcaatggactgtgacatagtgaacaccggggcttgaggtatgtcatatatacttgaagctggcggcaaattgcattgtggaggcgtcaatcgtacaccactggttgattcgaacactgaaatggcccggtctatgtaattgtcgagaaggggtataagcccttcagtggcaatctgtcgggggaaggctggatggcgggataggaactccagtccaagcggatcatcactgctgctaggcagtgatggttcaaaagaccaatcgctagaggcggcgaagtgtgcgaagaaagcaaccaagctgcgggcaaacagttcaccatctctgtcaccacacagatggttcatcactccaatcttcagcgttgatcgagaggcagtgctaaggaatttagcacctcaggaatattactgctgatgtctcaatttgctcacttttttcaaggttataatgatagggggcggtgatgaagttgtttatcaaacggaatgatgtttagtcccaagtatcggaatttggaatacttcccgacaggatttatcatatgagattatgatgaaatgaccataaacaatctttaatgactgccacacaaggggatggcaattgacaaaagattgtgcgtatgattcccacggagggaaatggacaggagagagaaaggagaacaaagaagagataagaaaggagagaactagctcactacatggtcctatcattagggacctgcgggcccaaaacgatctaactcatatgtagattagcatctggtgtgcaaggggttcgaacgagtggatgttaaatagttcgcacccccctgtaaagactagctactagcgggaaacacgcaatgggacagctgcagacatatctaggaagtattcagagaaattgccaaggggagaagcctggaaccactggggcttatggtaagttgatgagacaatagggaatcaggaagacagaggagtgtatgactagctctctatatgtagatactattactatgtatgacttgctgggtcttgtagctgactatttatactggcaacatgtatactaatgtaagagcgctttaatcagaagtcttacacttgcatgacctgtagagcctatatcgccggcgattggtgtcggtcctgtgtcgcttgcttctattgtgtctagatatatcataagccactggcctgaactatcgggcatctaccccaaattctgctgcctatctcaacagctcgccaagtcatttataaattcatgcacacagccatggtgaatcatcattggagaaaacctgtcttaaacaaaatccaataacggtatataaaataagcgcaacttcctgtgcgttggcggtgagccatgtcactgcccgatgatggccaacctgatgcaggggtgttgaaacggcccccgcctcttgagccactctacggggaaaaaatacatatagatagacttcattgtttttgcagtcagtttctctatttcctttctcagaagatgaacatcaaatggagggttgaccaggtgccctacacatgtcccttgtgacccgataagactgtctcactttgtttagctgcatagcttggcagggtatcagcccgtttacaaggctgagttcatgcggggagccctgttggctggaagaacgcggcttaaagaggactttttccccttttatttctttcctttctccttcttccctcgtcggttgctttttcatacaagctttttccaaaaacgaaatccatcatgcgtataagtttgtttctcgcaacggcgctagccgctctcgtaaccgcagatgaaaccaccagaatcaactatttcgggggcggaatggagtgggttcgtcaactgaacctccacccatggaccagcacagctgccagcgtcgctgggatcaatgccgtcgctaccacctacagaatcggatgtctgagcgatgcgccgaagtctgattgcgagatcgctacaccctggaccatgatccagggccccaaaacctacagtctcacgggtgtctataccgtgtcaggctcaggatcgatcaatgctgtgactggaacccacaacttcgattgtacttttgccaaggttaccgagtctccttcttgttcgtttagcgtgaaagtcaccggcaccactgcaggcgtttcctattcaacttccacctctacctccatcaaaaatatgccaacgcagtcctacacctcctacgggatcgatgtcacggccggaacagctttattcactgccagtcaggcaactaagactcccaatggggcagccgccatgattactgctgcgccaatgggggcagccgccgtcgtggcaattgctgctatgctttagtgatgggttgactctttgcacacgccgtccctattttaccctggccttttgggtagatctcattcgacgtctcaagaacaatgtttctttttttaagctgcctcagagtgcttaccactacaccgctactttccgtggagcagtcactcctcaatctcaaattgacggcatatgatgatagagaaatgggacaaaggaggcagtcaaattgggaaggtcctcattctggtcgcatgcattagctgacatgatgctagttgatggaataatagggtagagttgtcgggactccttgatgtagctgagactgtcccgaagagagcagcaaatacagcattacaatattgggacagtgtatggagaatgaatattcagatagaaacaaatattgatttatgcatgttcaactcaagactggaagaaagatcacaagggatgaaaccgaggaacaagaactgggataccaaaatataaacgaagataaaaacagataaccacctcgctaaaatgaacatgaatcggacaaagagcaaaatgatggaaggccagtcgacgacctggtcgagtgtgtctagccatggactcgtaacaggaaaaaacaaacaaccgcagagcttttacatgcgggcaggaacaaatatgtacaaaggaaagaccaatgttttttgcatatgattgtaatgagcacttagccatcaaggcataatgcgtcaagccaaccacgtataattgaagtgatcaccaagtttccttacagcaagtcagcatagcccataaacatcaaaacacatcaaaacttacagcaatatactgtccagcctccttcttccgctgccagaacatatcggcctcttgggcattgagattacccttggccatagcaacatcaataagggcagcctcaacaccctcacccatacctttacccgaaccacaaacaaagacacgaccatcaagcgagttgatcacaaaccaaacaagatcagcctggtgtctcacctcctcttgcacatagcgactctcgcccctacggctctgcacaacagtgcgcaccttgtcctcatgcacgccccactcgcccgagtaaagctcatcaaggagcgagtccctgacaccctgcagcacccagaccttattggcgcagttagccgactgcagacggcgctgcacgaagccgcggaaaggcgcaatgccaacacccgcaccgatgagcagcattggaccgtccgaggcaaaacgcgttgcaagcgggttcgccatcagtcctcggaacatgggtacgtggagatcgactttctcgccagaggcttcggcggcaatcgctcgccgtgcgagggactccaggaacccggaccctgcgcctgtgcgggacccaccgcgccagtcatcggattcggcgactgtgacggcgatctcaattaggcgtcggcattcggtgcctttgtaatggcaggagatctgggggtcttgggagagggagtagaaacggggcatgagggtgttgagaacggagagaagatggtcgagaggtggttgagagcttgagaaagcggttaggagttgggtgagggagacaaaagagcttgtgcgtaggtcacagaatgcaccttgaccttgggctgaggacagatattcgagaattttcttctcgtttggctcgcttgtgtactcggcgaggaggcggaagagtggctttgttggggcgtaactctggatgtcggagcaccagcttaggacttcgcgacgggtagtgatcagctcgcgaggcttgtcgtcgccccagattgtcggccagcggcctttggttgtgcgcataaggattttcttatcgcgcatagactttgggacacctaggaggttgaggacctcttcgacttcggagtccttgttcttggggcacacgccaattgcaccgccaactacaaagtcaaccatcccgctttcggcggggtagtcggtgacatcaatatcaaagtggtatgtacgtttctcggcaccaggccctgtcagctcacgggtgtggaatagaggcgcacggtagacctggtaaggtgggtgcggctgcacgaattccggcgggtggtctgcagggccaaaggtaagatcgactgccgatgccgggatcggcttgaatgaaacggtcttctctgggagcggggcaatgttggaaagttcactgtccatggtgaggagatcgaggttcaggttgaggctatcaaaggccttgttgccgacaggtccaacgatggaattgaagcctgagatcggtccatctacaggacgcaatgcctgtccccggcaacaacccccaccacagcagagggattgaagcttctgagtacctgctgtgcccacattccccaacacccttcgcatgtcgtccgagttctgggagatgaggacagtagatgctcgtcgcctttgccggacatcctcgaccttttcctctgcattttcatcctccgattgggactcggtgggtggagtcagagggctattgggagaattcgagccgctcgatgcagtgccctgggaggagcccgaggagatgacgttgaaattgatgtcggttaccgagagagaacgcacacctcgaggctcttctggaattgggttatctgggtgggaagtcgaggactttgggatttcctgataagtgcctctgcgggggcgggaccccgttgacgcataagtcgacgacggcatgatagattgaacggcatgaactaattcgatcagcatgtgagtctgggactgaattgggattggggtgtcctccacctacccatgacgaaattgagaggagtgttgggagtcaccgaaaagttgtacaaaagtcggcgcaatgagggaagaccggggtatatgagtcgagacgtgacgatggcaaggggatgtagtagaacccccttttttctctttctatgaatagagcatggaaacagaatagtgggatgagggaagagaaagcggatccgaagaattggtcgggacgatagttccgtaaagagaatcgggaaaatcgaaaatgacggtatgggaatgagaaatacagggtctcacagcgttgaagatcggaaacagaacagggattttatcagattcgccacattcctcgtcaccagtatgttacgcggttggttccggccttgatcgtttacatgtaaatagagctcgaatataagatctcgacttatcgttgatatcgaatgtcagcagtaatcaggactcgactactggatatggtaccggctccatttggggtcattgtatccatccagatcgacggtgcatatgaaggtgcacttgtactttccccgtattcggtggcggaaaccgccgagagattcccagttggctgctaccatattcaaatgtcatatgatatagacatatcttacgttgaccaaggggattctacacgggtgttttgaattcgcacaagaaaatgcaagttccggggtgggccgacaggaaatgttgaattggaacaggtgtaatgtatgtaacgtgacagtaccatacatgatacctcggttatcagatcaatcagatagcaaacagcggattccaatgtccgagtatgtaatcatatcccatctgataacccaacgtgtctcgacgctctccacatgatgtgtgttctatttgcaaaggggcactgattgcaatcaaaatcccctgagtccaagcctcgaggccccgtctttacaaaataccaaatggatctcgctctatagactcccccactttccgaccagccggacctaccggtagagttatgtatcccgttggcccatcacagctctcatagcttacacgtcccttaccctcggtaaaccaatttcccaaccatccggtccaatgtggggatgccaggccgagatcaatcagtgggtcggattttgaacgagctagggatgttctagaaaaccagtgaaacagatcacccctggagctttcaggctgaaaggttcactgataggctggtcgattcaataataacataactgaagccactccctaccggaatcagctgattcttttgtgcatatgtagcccgtctcccgggcttttagtgttttcaccaagtctctattctatactagtggcactgcattcgcgatcttgcatcagtccattcgacattctttgtcacgtcgggtaggaaggctagggtttgcgtacaaagtacggagtactccgtactccgtagtcacgcgggttataaagcgtttgagttatagggggaagaaaccttagaagggctaacaggttccatctgataacttaattttaatgccgatggccggctggacttccgagagacctcctaatcgagtaactatcatcacagataggggtgtgtaccacgtcattattatacgatgttggtctgtttgaagacgaatgaaataatgataatcgataataacagcagaatcccaagaccgtacctacagtatatacggagtacgtcacgtcatcacgtcatctctagcatccaaacataaacagaaaaataataacagaaaagaaaacaaatcctccagcccaaccaaacactctaactattttcatcccgctggaccaaagccacaggcggaataaaatgatgtcttccccgaaccaaataataaatagtcgcagatccaatgatgccaacatacatcgccacgctccagttcattgtttcagccgtaacatccgtcgacagagggaaaaacgcaaagataaagatcggacacaggaacgccaacgctccaagattcactgccatgccaaatttcccaagtgaccaccggtggtgtgggagcggctcgccccgaatgcgttttaagaatacgcacccgatcgagatgatataagcggataaaagggatgtgatggtgagcgagatgacggcattcagggcgacctctgatccgatgttgatcatcgatagtagtactgtgataactagagataccatcacggagttgagggggatgttccagcctggtgtgacctggttatctgttaatactgctggacttacacctcttattaggatgtagaagacgtggcttacatatgcgaaaaaggacgaaaagggcagcccctcgtcccgggcaaacgaccagagctggcgcgatgccgtcgccacttcggtgattgtgctggcggtcagcgtcaccaccagcacggcagtcatggcgtttgtcgcggcgatgctacccgtggtgttgtagaatatctggataaatgggaatctggtgggggtatcgaggactctgtcgacctcgcctagggtgaagcacagtgtgatcaacataatgaaccccaacacgccattaacggcgacagaggacatcattgccttagggagtgtctctgatgcgtctttaatttcttcggcttttgaatgtcagcatgatataccatgtctgtgatcattcgtggagttcttccttacacatatgaaccgagcaatcataaccaagcatggatgttatggtagtggacaagccgaccattgttgccgtcccagggctatcccagccgcccccattgttaaacgtggtgaagactgcgtgggcattgttgcgtggtgcgagtacccacaacgggatgatgatagcgaacaaaccaacaacatgaatgatcaaaatcagtccttccacgaagggaagattcttggctaagaaggtgttgaataagattgagaatgtcgaaatggcaattactagcatggtgccatgccatcgctggaagttatagtctggctggtttaagacgatcaggccttgaatgattgtgccagcaaggtaggcgatggatacaatggcgcattgccaccccattgcagaaagccatcctgagataatatgatatgttagctggttagacttacacaggaactggctatgttacctgtgatatagctgaggtatttttgtcctctctttggtgcgaactccgacacccaatggtactgtccaccagcagtgggagccctatttatcaattgattagcggtgatttgtgaagaagcagcaagccgacagtcacctacatcgaggccatctcagcaatgctggcgtagacaagtgtaaaccccaatgtgacgctgatgaacccccatatcaagcccgcggtacccccatcggtcaagccagccgccaacaatctattaatggagtcagtagtctgcataattatcatatgcagggactcgcacatacgtcaagataacttcccatgtgcagatcaaagtgcatccaaatcctacaatagaaataaaccgaaagtttctctttgtgatgttaacacagccggaacaaaaagagtagagctacttactcgtagaacctgcactcgacctagagcattcatatcacgcttatccgccagcgtgcccatatactgaggctcaacaaggcctttctccgcgtactcctcgtcgtcaaggccagtcatcgtctgctgtgagtcaggtctggatctgctgatgactgtcatgattgcgggcgtggctgaacgattaaatgtaatctattgaagatgagacaagaaaattctccgtagaaatataggggattgcgagaataagaatgaaagtcaatatcttctggcaactcgacgccccgggggatctagggtacaaaagtgccaatgacaaaagcaccctctaatgaagcgaacaaaaatgaatgtaaccagaagaagaaggtattaggagaaagcccgaaggactagaatcatgacggccactgaatttcggggattgaagcgtggtattgacgtgggagcaaggcatggcctaaggaaaattctcgtgcaccatgtgggagagcacatctcctcggaacacccaagcagcgatccgaatgatacatcgttctttgccaaatggtgatgcatctaattcgatcgggaatgggactgttgaaactagtttttggagtttgctatcccttgtctgttgcccggaatggggctattgcgaccttgcatgccaggggttgaataatacctgtaatcttggaagatattggggtttggactgactgtcggggttgtaatgccactctaaaaacttctaatacttctatatatctctatcactgttgtatataaaccataacttgtttgaagaacacacttaccgaaattgtagccgatacaaagtacgaaatataaacaaacctaaccccttcggtaccgctgcccgacacatttctgatgtatcatctgcgctagccatctagacctattaatccctgtcgcacgtccctcattgcttatcccccagacaattccgccacactccatgcctagctcgaaccaaataacgggtggatgcatgaacccctcgctttatttgcccaagagaaaaccgcatggcctatcggatcacaacctcctaaagacccacagcctaatcccgaaggggcgcacgatgatcgacaaccctacagcggaccgccgtgccctaaacgcatgttcgcagtacggataactccgtactacatcgaagttcgacgtgagggagagaagtaaaatcaccattccaactgaccttcgcttaaaccaaaaatgataattgccaccatttatatcctataacgaaagaaagggataaaccagccataaggctttcggatacacctacagcatccgcccacatcgagcgaatcccaccagccctatttacgtacatgcctgaactcgatagtctatcttttttatcggatatcggcatatgacctacgaaggcagaacaatcataatcccaagtgagtgggagaaatggaacctagcttaacctttattgcctcgccttgacgcccgcatacctcctgcttgtgcttttctatacaacgtatacaagcgtctcaaatcgaaccccttcttccgcagtaatttacatcccgccattcagtgcacatggctcccggatctgacagcctttcacagtcgcttctgtgtctgtgttgatcagcgaatcccatatatacattccacatactatcaccacagtatatccttccctccacatgacatagatcataaccacgagaagggtacttttgagattatatcgtttgcggcggctcctgcttcctcccctgccatgggcccatatgtgccgccaggccagtcgccacccttcgaggtcgtcgatgacttacatcatggcgcatgggtgataattaccgccgcgctgggactggtcgtatctctcgcatgtttcttgattcggctatatgtgcggctcatgctgattccgccgtttgcgcgcgacgattggattttgttgggtgctacagtgagttagggcttgacaagtcgagtcaagtttggggtgggagaattatctgagcacgtaccctgctgacatattatttttacttgttgtataggctaccgctgtggtacaatcaagtctcatcctttatgcgtgctcgcgcgggttcgggacttctatatcgttattgaaggatggtcgactcgatcagatccaggcagtaagttgtttgaattctactacttcaatggacctaaactgagcagctacgaagttaattgcagcaagcgatatcatcgcgctgataataatttacctctccaaatgctgtgtcgtggctatctacctccgcctcacgcctcagaaaccacataaccgcgcatcctgggcgacattagctctgtgcactgcctgggttatccctgctatattcatcgtcctagttaactgtgagctaaacacaccttggcggagtgatggtgggcaatgcaacgacttggtacgtaaaccccatgatataccacgcatcagctccccgaagccgtttctcacctcgcaacaatagtacatacgatggcaattcatcgcagcagtcgatgttataactgagctccttctcttcatcttagccgtggtcctcctaaaaggcctatttatgtccgttcgccgcaaactagccgtcggcttcgcatttatattccgctttccgtgagtaatctacattcaccccatcctcaacctcaaatccaagactaaccgcctaaatcaagcctcataatattctccttaatccacatctcaaccctccacacggccctaaagagcaaagatacaaccctcgccgccgtcaacccaacagtctggatgcaagtcgagctccagtacgccctagtcgcatgcagcgtattctgtctgcgacccttcatggcagccgttagcactaactacggtacggcgggtgactcaacgctggaaggtagcgcgtcgagatcaaacggaacaagagaaggctcgaagaccgggtctgggtcgggctcgaatccaaataccgcttcgaggtctgtgtcacattctcgcatgcagaggaaaagagttggtacagggtcaagactgccaccggttcctccggccgttagttctcaatcgcaacagtcagagaatcatggccctggtcagggcgctccgttgtgtcttaataccagtacccatgcgcacagagcgcttggaaataatacaagagatgggtatagtggcagctcagatacagtttgcccaccagtgcgtcggtcaatgttcccgctcagcgcgccgcgcaagaagttgagctttcagatgctggataaagggaagaatgggataagggctgggtctgggggtttgtttacggatgagtcggatttgattgagcttatgccgaggtcgcatactcggcatgcgagcgatgcgactgagctagaggatgaggagggggcggataagatggttattcataaggagattcggtattcgattcaatatgaggatgaggatgaggctgagttaaggaggcgggaggatttgaagattaattctgttgatgttactgcttatgtataattatatctctatattatgccttcttgtaggatgtgtggatgtgggatattaaagggaagttgtacacaaagtttcaatattataacgcttcagttgttggtcgcttgaaaggatgggcttcagtgctcctaaaaagaaaagtgttagctcatgaagatagtataaacacagctggccgcaaacgtacagcacatagtcgtccagactgatatgatctggctcagaaaagatgagatagaggtacttcaaagtttcggcaagccaaaaactctccattttgtcctcatgtttcggtttcaaatgacgcacatcgttaatagacgaatgaccaaatttagttcgggtcgccttgtcgatattcttgaacatgcgccacgcggagtcttgaagagtcttatctccagtaatccggtacatgacgaatagagactcaagagcttcaggtctggatgaggcgtatgttagtgggctgcactgggaggaatgggataaattcgtacctgagtttatacgatgcgtctcggacactagtcacaccgggtggcagacgctcaacctcgatctggacctccgctttttcgcggtcctcctcggtatcgatagagtgcgatatgacatccgacatccactgctcttcatcccacggacattcatcaatgtgctggcaaggactgactctgaaaacctccggcataattcctgaaggcataacatcatatgcccagacgcagccgtcggtaagtccccgagcaacatacatatcctccggtcgattgaaaaccttagctccaatagccacggtgccacccatgaagcacttgaggtggtcaggcgcgtactggaaggtcttcgagtcaccccgtagtgcgacgacgttagccgtaaagagaaagtgttggtcctcatcctgggtcattcctctgaacagcagattctcgttgaatgtttcaatggccttttcgtacattcggtgatatttgtctgtctgtccacctaggagaatatgttccttgggcaagtattcgtacgcggaatcggcacatccaccgatagtgaattcggagtcgtcgaatgtcattaggtcggtgttaatccaggtcggccacatgccaggcatccgggtcttgtcttgtccgatttcgagctcgttcatgatccgctgcacggcatcgtagtacttgggatcaccggtcaattgggtcaggcgagtgaactccatcgtcaaggagcccatttccgctaagcttgtgcgtgatgatggtgtaatttctttgccttgggcggatctagatattgtcagtcacaaattctccttgcgtattattttctatttgggcataccttatccattcccaacgcacttggggcatgcgattatgcgtatcaaacgcattgaagatcatctcgcctagttcgacagcctttctcagcaggataggatgtttgccctcggtcagatcatgagcagcaataaagccacccatatagcgaatgatgatctcaaagacaggcacctgcctgctcttggtcgttgtaaagtcgatttcctccagagcttccagagccagctggagctcatcgtccagtcccataatcaccagcgcatctagcgaatcaacaagcgtggcaccccatccattaaaggtatcctggtaccctccagtgcgaggtttcacctcgtctcgcatccacgcataatccttatatccattccatgaatgaagaaacgcctccttcacagcatcccgcttcttgagtctggccttgcgctcaccgtgggtttcttcagggaagtcatgctgtatgcggggaattttcgctgaacttgttggtagcggtatgtactctgtaacagggaatcgctcggtgactttatctagacggatagcatcatgccgaatagtgctgtcttttctggagattggctttgctagacgacctcggcatgtttttgtactagggagccagaagaggaaaacgtatgtcgcgacaatcagaaacaacgctgttgacaaaggtcgatttttgcgcttgttgtacataataaatgaatggaatagggagatttcaaaataacccaagagacaacaaaggaatagtcataggaagcctagagaaggagtggaatgatgtacaagtcaagtcaagtagggaccagtagcaaatgccggcatgtctcagtgaacaagatcctgatacataattagagcaaacaaaggaggaaacatattttacaaaaggtggcacgtcatggattgtgagaggtctctagggaatcagacacggtttggagctccattgatcgtccctggtggcttttggaagttaatgcgaggtatgatcttggagagcatcgaatgatcattggcgcaattcgagaatgtcacccccttcacacctggccacgcaacaagggaagactgcagggtccaatctgtagagttattaatagagtaatatcaatggtcaagtctagactggtgagaaaagcgccaagacggtttttacgtctctctgctcagcgccaccaaccccaccgcggcccctgactgtccctgatagagtagttaggtaagggttgatcttgacgattttcagactggaagatcggacaataacacattgtgggtctgaaagctgtgctttggtatgcatatgtaccctgcctactggggcttcctatctcagctgtcgccacttttagggcactcagagtcaggttcaagtaaagttcaattagggcaggtagcccggggtcgtgaattagattacataatttattcattcataaccagccatcacgtgatgaaccagtgaggtgctcactaaaccctcaccctcaccataattacccaacggagtactttgtttattttgcgataattcgttgattgccctcacttctcaccatactctgaccacccatatggacgggactcaaggcccaaaaggcggagcactccagagtttataccttccctatttgtcgtttccttttcttcacgcttcaaccgactttccccctcaagtcccgcaagaatagcgtctctaaaaactgatggcttcgcaggcccagatctttctcttcctgaagccgtttctcgtaccataccttccttatattctatcccaaacagtcttccagatggatacgtcgtcaaccactcccgtttcgagttgctgcgcgcctgtgccaaaaatcttatcgagtcccttcagtcaaggtcagaaaaccagtggcttgtcattatcggcttatcccgatcagatatacacaaaaactcgatgaagaccacagttgtttggggggatgggttataggtttacatgggaaggacatgctgggctcatcaagatagtcccctccttcgagcgcaattcggtcgtggatgggcccaccagggtactggatctcgacttctaggcgagaagggcattctgaaagtcgacatggtgactttctcccttgttctaagggatagtacttttgtgtcttggtagatccggtatgagattgagcggtatgtcacttggctgtgtaggacctgtaagaataatatgccgaccttcggttcttgacgaggaagaaatggaaaaacgcactatcggaagcttcagtaccgtgtctagtggcttggacatgacttggatctctaatggtacccgccaggcaattccaagaacgtgccagataagaccacagatttgtgtcgacaaccagcagaaagtgggtagctaccacgacatacaagctgaccagggattccttcagccatctcgccgccctcccggctgaccaacactcaccgttgagatggggctttcagaatcgttatctcagctcagatgaaatgccctatagtggctatctaactcttccggtgaggttcgaatcgtcttgattatctctatgttaaaaaaaaagataagagtttccattgaaaaatggtaactagcactaccgaatagtccacgccccctcgagagaaggcatacattcaaaccctataccaatagatccgaagatccctcggctaatccaacagcaagtagtatcgcagtaagcgtactgtgcacgaggtcgaggtttccactggtagcatgtctggtacagtttcccatttattacagtgtatgatagaccaccggcataaggggagggagacattgtccttaccgcgcaggattttctagatttcaccagtgatctgatttaatattgcggtggtttgctttttgggagccctggatatattcgctatacttctccataccccttttttcgtttcattaccaattgaatctgtcacacgacaggaaaatgaatgcataatatactttgctttcagaaaattctctagattctgcgcagacgtatattattaggcttctaataccttgcaatatcataataaaaaaagaataataaaaggattcggttcatccgaggaggttgaaatatgtacactagatgtttgctttgtttgcacttcaatgctatcatgcaggctttcatctacaggctgctccgtacttgattctccataacaacctcgtatacatataaattgtccaaaggtaccagtttattcctattttcaatgtttatactaatcaatatatagattgaactcccgtcctgtttaggaatcatcttttggcattcctctggcactggacttgatcatcattgctattgatcgatctctatatctatattgcatggtcgctacctgctacagattcccaaatcaatccttcaacaggacttaagactatctgggaacctatcgccgcatcaatttcccaattgatatccctcagctcaacactgctgtggccattagtcccatctcttcctctgcacctgcccggaaaacaaacataaaaatgcctatcacagggtaaatatactccatatccaatagaaacacgcaaaactaacaccccaaagcgtctacttcatcccctcaaacccaaacgcctcaacagccctccaaataataacagagcgtctgcgcgccgccttcccaaatgaagaactaatcccaatcggccgctggggcctagagcaaaagctcctacgcgacaccccaggtctactcccctcttcaaactcaaacaagaaaccctcaaacccacgctacatgcaattcctctccttaacccactacccaactcacggcttcatctacacctcggagcccgagaagcccatcccagcaccaaaccaaaatcaaacccaaggcgcgcctggccccgtaaatgccatcgcgccagaccactccgcctccccgccaatgatcatgacgactgtccccccttcctcatacggaaccctcttccagcacttcacctacgcttgtcagccattctggagccatcggctcaccctcactgtcccgaacgggatcgtctacgaggttggtgacttccgcgtgcgtcttggtgatgtccggcagacgttcccgacggcgcgagtgcgtggtaccgttgttgagattgagtggcgtggtccgtcggttgtagaggccattcccgtagatcgggaggatgggtcatttggtgctggtgttgatgctgggggtgagggtgatgtggacgttgaaactgccgggatcaacctcgatagctctgcaattgaggagtccgacatcgatgccgagtatgcggcgactgcgtcgttgattcgggagttttgggggagattgggtgttgaggctcgggaggcgattcttattccgaacgttgggatggaggttaaggatcggctgaggaggtggaagaaggctgagtcgtctggcattgacgctaggattgatagtagagttgatggggctagctctgtaattggcgagcgtgccgaggaagatcctaatccgtggtctggggcggatgttgcgaggcagtttatggaggttttgagatttaatcgatagctgggtgtttatggtggcggttggtatgatggttatttcttatacgcttgctactgtgttttgtggacattggctggttggaacaagtctcgcactataggacatagggatggagccatcattcctatattatgaagactcgacccaaagtaccgccagtccattccgtctgcatttcaaagcgcacgcttgatcgtaaatcatccaagatgtatagcctagtgagcatagactacaggaaatcggtattggaaaattgaaatgtaagagaaacactctcgttaaaaaccgcgacgtcagctaacatggaaaaaggcgcacggtgaaatgtgtcgcttatttttgcatcatgagctgaacgaactcgttgtctgtatggagagggagaggttagcatttgggcaggcaagtgccggtaggctccaagattgtttccaaacatacagtcgattcggccatcaccatcctggtccgcctcgcggatcatctcgtccacctcgtcgtcagtcagcttctcgccgatggaggtcatgacgtggcgaagctcggcagcggaaatgaacccgttgttatcacgatcgaagaccttgaatgcctcgcgaatctcctcctcggaatcggtgtccttcatcttacgagccatcatagtgaggaattctaccgcacgtcagtagccgtctctcgtttataccaggaggttatggtcaaataccggggaagtcaatagtgccgttgttgtcggcgtcaacctcgttgatcatatcctgcaactcagactcggaggggttctggcccagcgagcgcatgacggtgccaagctccttggtggtgatttgtcctattagtaggattgtatgttagaatacttttctcgtgaaattcgatcgcagaggacactgagctgtcgggcgcgaccacacgtaccatcgccatccttgtcctatttcgcaatcaaaccaactccggtcagcatattttcgactatcaagtcttcaatctgtatggtgagtcactcacaaacagggagaaggcctccttgtactcagacacttgctcttcggtgagggaatcagcctggagaatgcgatggtcagtgaagttcaaatgaaatgccccgcaatgtgggggttgaattttcgacaacacaactgagaagttaggggatcagggacataccatgatgaatgtagatggaaaatacaacaaagtaaggaggggtcaagtgaagaagagggttaaggggaatagccttacaagagttaccaaaatagcgtgcctgaggtgcccagtcagcgtcgtttcatcttagggcggtgggacccctctctggggctgaatgttgccacaattggaagttggaatgcatgttcaggtcatttttatatatattcttggcttatttcatatatctaaatatctgttgaaatactgtttatcatcgccttacttcctgtatgctcatgcggatgtaacggacagaaagcttgatcccggggttccagggctacgttgagcgggctaacagtactataccgaatcgacgtggaatggagccaaattgcttaggggggtcttggctattatttgtttggggatttctgtttatcctacttaatagagtgtaactgcggggtggatgtatagatctagaagtaaacactgcaagacgtcctatattaattgaataaagcgatgtgttcttcaactataagccttcgacaatgccctatttctacctatttaggctcaaaacccggggtttccatgtcactcaattgagcacgcgactcatagtaaagcgatttgcagtgattggcacaataacactcaagacctcagtgtcttttgatagcaaatatgtccaggtcaagctgtcttcacagtttacccagccataccaaaattaccacaactccacgtggacaaaaccaagggttacatggtgaataccgggcatacgtgaccccttccgacatgtggagagctcctatcattcacttccggctatatcgagaccccaatctccctttgatcccagtctatcaccccccagctgatcatgattccataacctcaccaaattaataaactgacataacccgatcctacgaacgccctcacaatgtggcgggatcgaaccaacctgtatgcatccccatgtaccctaccctacccaagcgcaacccgtcatcgccggacagagccaaaaaaaaagaaaagaaacaccacccataaaactcagcctataaagcataccagcaactaacactccacctccaaatccagctacctctcctaccgccaatccctaatccaccacccagctaaaaagccacacttcacaccaaccaatggcttctccgacacaccctcgcacccggaggaaaataggcgcctaatatccgaaacagacgaagatggcgacatggtcattgaaatggacctcttaccgccgcgctgggtcgacgtgcaggaagaggtctccgagcagttagccgagattgcccagaactccgcccagctggacaagctgcaccagaaacacctgctccccggcttcggcgacgaggacctgcgcaagcaagacgagggcgttattgagcgcttgacgcaggatgtcacgcgctcctttcatgattgccagcgcgctatcatgcgcatcgagactatggtcggcgagtctaaggcgcatgggggtgttacgagtggggaagagactatggcgaagaatattcagatttcacttgctgcgagggtgcaggaggctagtgctaggtttaggaagaagcagagtacttatttgcggagtatgagacccttctttctttttgtgttcttgttcttgttctcttcccggtgaaggccgaatcggttggttccatgtgctgatttgtctctgtccagaattgcgagatctcgagggtatcgcgacaccgttcgatggcacggctacgcagacccagaacccatacacggatccgtcgatgatggagtcagatgccgacagatccttttcgcagaacatgttacagcagacttcacaacggcagaccggtcagaatgatgctgctatcgcacagcgggagcgcgagatcaatgatattgcaaaggggattatcgagctttcggatattttccgtgaactgcagagcatgattatcgaccagggaaccatgctagaccgtatagattacaacgtcgagcgaatgggtaccgaggttaaggctgcggataaggagcttaaagtggtatgttccttctttactagcaacttccccccccagagcgaggaactgacttatataggctacgagttatcaacaacgaaccactaagcgtaaggtcatgctattactcctgttgatcgtcgtgggaatgataattgtactggttgtgaaaccaaaggggaagtcttccccgccgccgcctccggaggatgaatcttcgaacaatatccgctccgtgttggcttaccgggggcgaagacatcagttgtcgaaccgcttcgcgcgagatcgatggatggatccggatatattccgatgatgtttctttttttaatagcattggttcatagttaatgtgaccagaagagcagacgttccctttgcatattggtagttgctgtacaacatagctgcttagttttagagtaaataggcaatggatatggagatgctagatctcacgcaagacacttacttgcactgggaaaattcgaaaattggactacagacctgtagatcaatgccaggttacattatacatttaattacttcatacacgagataaatgatatcgaacataagccgattgaatagaaaagaaatgaataaatcacacgaaacggcgcgatgcacataaattaccagggtaacatatggcctcgatcataatacttcaagctcactcaccgattaccctgggtcgcaagcagatcagctacatcggaatctagatcgccggctgcaaaagccgcatagtcctcctcaccatgggagatcttgcgcctctttgcatggacatcggcagcgacatcgaagtcattgccatggttcggagaaatggtagtgggttggtcggagacggcagtcccgttgcctgactgctgcatgttggcggtgttcgtagggttccattctgagacatcgtcgtctgcctcttcggtaaaagggccgcggcgaagctgctgctttcctggttgtggggatcccactggcgtaatagcctccaccgggggaggtgtcaaagcttcgactgttgggcgggcgggtgcatcatcgtgtccgttgtattcaccagggtttgtggaggactcttcactgggcagaccgcgcataatcgcatcttcgacctcgcgcttcttggtatcggccgaggctttcttctgtgaaagctcggcgctaatggcctcttctttcgatagctctgcacgattggtctgcaggatcttctcgagcccatcgatcaaggcgtggcgcgacttgattacttcagagagagagttttctgcgttggcgagtgtcttcaagagtgaacttagacgcgcagcgtgaacgggcagtgtagccttaggagttttggggtcatgaagcttgtcgaattccgaagtagcggttgctgcggaattgtgggagttgatgacagccttgttgagagcaacctgcaacgggttgagaggctgcagttcggacggggaggatcccgaagaagtgtccttgaagaaagatcctccgagggtttgcttcttgtttgtaggacgagctttgtcgagttctgcaacatgatcagtttagatagtgcatcctcgtgtctattgattcgacctaccgtctatgcgagcttccactgcatccaaaataaccccgtcaaatacattgcgttgtctccagacctccacgactcggcggatcctttgctggtattcattcgaggagcccttgtaagcagctgacgtagcatcgacgatgatctattgttctgttagtttgagttgcgatcgtggactggcagggagacgaaccggagatagcgcaatgaggaaatcattttttccgcgtactttagattgctgggccacctctatagatatgattagcaagcggagtgcggctcatgtgtggaggacatgttgtaccattggctaggtagatcaggttgagtcgcttgggaggcggcgagtcgcggatcttttgaagccagatctgtccagtccgttcagcatggcgtctagagttacagacaaaagaattagcaagtctctttgaggctggaacaagtgtctgtacctgtggaacatgacccattgcgcaacagtaacgatgctctcctgcgtgtcattcagagccgatagctttgctttgacagcgtcatcagtgaaagccatgatgacaaaaatagtaagcacttgttttattgaacagcaagcttttgagaagtgaaattatcagatctgaagtgcaagtcgcaatcgctgttagagacaaatagacaacgagtagaaattggagaccactggagagatttggaaccgcgttgagtggcaatcaagtaaagccaccgaaataaagtcaaaggaatatcaaacgaaaatctgaactctcaacctttctcatcacaagtgaagttgacatcaagtggtttgtaccccaagcttgagacatggataagcttaccgccccggatccggcagaacaacgggcctccgagcccgcccaggccacacctgtcaacactacttcctataactatctacttcctggtcctttgatttcttctccttacgaccatcttcttgattcaaacgtctttattgagtcatacaacagtcaaatacaatccattcccagcatggctgaccgtttcccttccctagaggacttctctgagggtatgctcaacccgccttacttgctctccttacaccggagctaacatgacccgcatttaggtcaaaccgaagtagccgatatccaagccaccaccgatgacgatttccttgctcgcgagcgtgctgtgctcggtgaagacgccgagcaattcgctacttctcaagaccacgttgccgacgggaatgtaggcgcgggggatgatgacctgctcggtgcaggtgacgaacccgttgaggagattggccaatttgaatcagcattcccctctgtagcgacgcagaacctgaatgaggtacgaattggctattggatacatggtggtggacatgcagtatgctgaccaggggttacatctatgcagcgcgttgctcccggcggcacaatcactggctccggctcacccttcccccgtaccggatatcagagcgcacaggaacccgaagatgagggagatgccgttcggtgagtccaatctcaaactctggatgatggggcgcattgcctttgcgatctgcatccatcctgtctcggcccggatcccccaagctaacttctgtctttgaattctcagcgaatggcgcgaaaagcgtgattctgagattgcccgccgtgccgaggtctccgccgagaagaaggacagtactgtcaaaaaggcacaggaggatattgacgacttctacgtttcctacaacaataaggccgataagaaccgctcccacgcccgcgccgaggccgaacagttcctcgccaaccgggaggacacctccgccggaggcaccagctgggagcgcattgctaagctggttgatgtatcgggcaagggctccgcgggcggtgccagcggctccggaaaggagcgtttccgtgaattgttgatcgacctccgaaaagaccaggaggctcctggctccagcggaatctaggtggtttgctttggcgtgtgggggatagaagattcgggggtccggggttaagacatggttcacaagtttcccacatttactcatctgatatggctttttctacatccccctccccgcattatttggtagccttgccgtgatttgggcgctacgtctcttattctctttttattttattttactccacgcagcgaagtctctaggggggtttgtaaattagtatctcgctgaaattgatagcatcgttaataccacagatttcattctccggccgattcgtgccgagtagatatctttattacacgcttaatagtacaatacggatgtacaccaatcatggaaatagttggacaaccagttctcggatcaagagaaataaatgcatacttaattcatatcatcgtcgcttttgaagcatccttagtcaagctcggtaatatcaccaccgggctcaccaacttcctgctttccctcttcttccaactccttcagtttcttctggccctctgctgtcgtggcgtcgacgattccttcctccaagctgagcatgccgccattgcccaattgctccacaacgacctctgcctcctcgacagacatcttgccgagaaccttgttgacttcgtccaaggactcggttgccagtgccttttgcaggtcttcagggaaagcgtcgaagatcttgcgtacctcaatctcagttggatcttcgctattagcggcaggaatgttgatagtgatcttggtgttggggtcaacagcgtgcagctggatttgctctacgcccgcaggatcgttggatgctgagccatccttgctgagttcagcggagcgggatttgatacgagcgtaagtatcattgacatcattaaggaatagggtggatgcgcggtgatccttggtggtgatgctagaagttcatatgttagccattgaccggggaaaaaaaatagctaggaggttgatataccgagtgaagaacagctggatgccgtcacgaccgagcgagcggcagtattgcagaagtagaccttggtgcacgcactggcgagcataggcgtcttgacccttgagctgactgttgaatgcctcaacaagtagtccgtcggtctctttctcggcgacaatttcggggttcgctgagatgaactgaagacaggccttgtagtctccaggcttgagctgagcgaacttctttgcaagcggactaatctcgatatcggcaggatcatcatcgtcgccttcatcgtcagccttggcggcggagcttcccgcaccagggttcaggagctcaacagagctctcctttggtttggcagccgccttcttcttttcatcagccttggccacatgtgattggttgaaaccttcgtgtagctgatcactggtgatcttagcgccttcctccttctcaagttgcgcaagctttgcaaacaattccttttggagtccttgaatcttttctaagtgtccattcacaccctgaatgtatgccttgaagagattgtcaggcttagaatcaccaatttccttcttcacctgatccaccagtgagctcatcatctgggaaaatttgggctgttccggttcgtgtgtgtatactccctccggcggggtgggggcctggtcttcggcggggttgcttgcgaactccataattgttgtgaaaatgaactcatcaggggaagcagacgagtcctcatgcttcttgagagactcaagaagcttatcgatgcgtgacagcaatccatcattgataatgcgctcgtacttcagggttttgatttcatggcgacgttgctctcgttgctggtgaatctgggcctgctttgctcggatgaaagaacgtttatcgacattgggatgaacttcgacatccgaatcatctgacagctccaaggcgtcccatttgctataatcaagaaccatcttgtctgacagtgaatgtgtagagtaggtatgaggtggggtggtgggtgtattagcggcagaggaaataggtgagagacaatgtttctgatcttgacgtgaatagcaacaatttgaccaatatgttttcgaagtgatttattcttatgaaaatcaaaataaatgaagctctagcgcccgagcagatgaagtatccagagctctcgacgggcttctatgggcggtagataaaggcaaaatcacaagcggtcaaatagggcagaatcagccccgaaaaccgcttttccggtggccgtgggtgtccggcgaagctctagacacatccgttcatccatcgcacgttccaaggagctgaatgtgtgccatgtgatgtactcaacttgaacatattccgactagatatggcaggtcgacgtcttattcggtgacatcattgtaactctattccgtttcgatccaactccgatccaactccgagatgcgcggtgccaggctgccggtctctctggccttgggcgttagcccacggcaggctttgagaccatatagctcctttgcttgcgatctacttcccaaaacaagatcgtctcttatctcttccggagaccacaatgggttgaaccgtctcaattcaaccgcctcgggtacactccgggatggtgccaacccactattgcttcaaaatatcagcttcagatataccgcctctacatctcgcattgtctcacaagcacgctttctatgttcgacttctcaacttcgccaagcgaaaccacccgcaacctccatagagccaactactcggtcagctacagaaccgaaagaggaggaggacaaggggtttgaactatctgagcgagcagcgcaggcagcgcaggtcaacatgagcgctagactggccaaggaaggcgcagcgggaaagaagtccgggttttcagaaatctggcggcttttgaagatcgcgcgccccgaatccaaggccctcggttttgccttctttttcctcctaatctcctcgtcaatcacaatggcagttcccttctccattggtaaaattatggactctgcgaccaaaggtgtaaccgaaggaggtagcgaattgttcggcttgagtatgcccatgttttacaccgctctcggtggaatcctacttattggggctggtgcaaactatgggcgcatcatcattcttcgaattgttggcgagcgaattgttgccaggctacgctccaagcttttccgtcaaactttcgttcaggatgccgagttcttcgatgctaaccgggttggtgatctgatatcgcgccttagctccgacactatcattgttggcaagagtatcacgcagaacttgtccgatggtctacgagctgctgttagcggtgctgctgggttcagtctgatggcctatactagtgcaaagctgtccatgatcttgctcgtcttgcttcctccaatcggtctcggggctctcttttacggtcgagctatcaggaacctcagtcgtaaaattcaaaagaacttgggatcgttgactaagattgcggaagagcgtctgggcaatgtcaagactagtcagtcgtttgccggtgaagttatcgaagtccgccggtacaacaaacaagtccgcaagatcttcgagcttggtaaaaaagagtctttgattagtgcaaccttcttcagctcggtgggtcggcagtcttgattcttttgcgctttgcgactttgactgacttcttactagactggtttgatgggaaatatgaccattttgaccctgctatatgttggcagtgggatggttcagtcaggtgctatcagcattggagaattgacttcgtttttgatgtacactgcctatgcaggctccagcatgttcggtctctccagcttctattcggagctgatgaagggtgtgggtgcggcgagtcgactctttgagctgcaagatcgtcagcccacgatccacccaaccaagggtatgaaggttgaaaccgcgcgtggacccatccggtttgagcatgtcacgttctgctaccctacccgtcccgctgtgaagatcttccaagatttgaacttcgaaatccctcaaggaactaacgttgcgatcgttggaccatctggtggaggcaaatccactattgcgtcaattttgctccggttctatagccccaccaagggcagggtcttgatcaacgggaaagatatcatgggaatgaacgccaagtcccttcgcagaaagattggcgtggtttcccaggagcctgtacttttctctggaacaatcgccgacaacatctcctacggcatgcctcgagcaacacgctcagagatcattgctgctgcacgcaaggctaactgtcaattcatcagcgacttcgtaagtccacccagcagctattatttttatgatcctaggctaacctaatgcagcctgatggacttgatactcacgttggggctcgtggagctcagttatctggtggtcagaagcagcggattgccattgcgcgtgcccttatcaaggagcctgatattctaattctggatgaagccacttccgccctcgacgctgaatccgagaccctcgttaacagtgcgttggccgctctgcttagcggtaacaacactacaattagcattgcccatcgcctttccaccatcaagcgctccgacactatcattgtcctaggccccgacggcagggtcgccgagcaaggctcctacgagcagctcagttctcgcccggatggcgcctttacgaagcttatggaatggcaaatgagtggtggcgaaacaacgtcaccttcgggcaagccgactgaggccgatgagccctggaagctccagacggagtcagaacctgatctggaggaagatgatgtagaagaggtagaagagacagcctcttcgaaaaaggaataatcgtactccacacctcgttcactcctcctattcctacactacatctcactatgatgtctgctcattcttgtagatttcttttttctttgtcaaaatacatgttctcatctacactcacctgtcacggttctcacgtcctcccttctccacctacacattctccctgttagactttgcgatagatactatgtaattacagtgtacaaagatcaatattattgttcgaattctacttttttttcggttcggtttctgtcgcctctgttctggcatgtcatggaaaaaaaaaagaaaggttatactgaaggacatgtgtgtaccggataatgcctaacatcagaacttcgagatcgccgtccggagtccggtgcgggtccagcgacatatcttgcttagtaaccagtcatatgcggacgacctcgacagcgcattacagctccttgatatgagataatccccttttttgtacagaatcttttgcttatacataagaagtagtggttgaaatacagccatgaaccgcatacgtagtctcatcgcccgcccagcggcatatgagcgactacaggactccgccgcagacgacgccgatgagacaacatacacgcagcgacagcagcaatctcccttttcaagagtacattatggcatattcttcctcctcggggtgtctatgctgtgggcgtggtaagcggaacttaacagtctccgaacccggaggaaacaagccacatacatgtgtgttgggccgaccatgaagctaacgcagagcatgatctaggaacatgttccttgccgctgcaccatatttctacagccggtttcagtcggacgactggacaaggctacactatcaaccgtcgattcagtccatgtcaaccgtcaccaacctcggagccgcctttaccctagcaaagctacagaagaacgcgtcctatccacagcggataacgttttcgctgttgctgaactctgtggtcttcgctattttggccttttcggcagttgtcatgaccgattcctcgccgcgagcgtactttggtttcctgatggtgatggtgtgcgccgcgagtctagccactggtatcaaccagaatggcgtatttgcgtatgtctccgggtttgggagggatgaatatacccaggctatcatgagtggacagggtgttgctggtgtgctgccttgcattgttcagatcttctctgtgttggctgtgcccccgaaggaggatagcggccgagaccaagagcaagaccccagcatgcctcagacgagtgcgtcgacgtcggcgtttatttatttccttacgtctacgggtgtctcggccattgctttgctggccttcctctatcttttgaggcaacaaccttcttcaagacaaaagttgacaagagatgacgatgagtctattacggatgaccgtgaaaattccaagactgtcagcctctggactttgttcgtcaagctacggtttctggcgtttgctgttttcgtctgctttctggtctccatggtattcccagtttacacggcggaaatcaggtcagtcaacgatcctgctagttcacggatctacgatcctagtgtctttgttcccttggcatttttgctctggaacctaggcgacttgaccgggagaatgtgtgtggctattccaggagtgtcattgggacaacatcctcaggtggctgccatggtggccattgggcgtgtcattttcattcccatgtaccagctctgcaacatcaacggccaaggcgctgccgttaagagtgacattttctatttccttatacagttcttctttggtgcaacaaatgggtacctgggcacaagctgtatgatgggcgctagtcactgggttgttgccgatgaaaggccggctgctggtggatttatgagcatggttctcgtcggtggattggctgctggaagcttgttgagtttctctgtcgccagtggttgatttcggtgccgtataacttgtgttcatcttctagacacaaatatcacgaatgacgaaccatgaaaatacttctatcctttggtctcagcataagcatttgtttgctaggtgacccattgagcccttgagccctttaatgtagcccctgttttccgtttgataggagccctaagttgagacccaaggcgaagtttgccggctgtcgccttcatgttttcaatcactcttaaacacgccagtcatttcggactttaagcgatctcctaaaagcaatcactcaccatctcacatctcctagtcaactcctattacaagccgcttgtcgtctgatcttctgtttgcccgcgcgcttcctcggcgtcttgtccttcaccctctcttctcttctcttccctttttccctccacaccgttccctcttttgatatttgtctttcctttcgggtgtccatcagtaagagaaacatcctggatgtctttgattgtataacttacagtctctagttgttgttcatgatgattttcgtttcattggctatgggcggctggtgccatgccctagctgtcccttcattctggagtctactgagtggactccttgtcttggtgagtactgacatacaaaaccaggtatttaaggtgtggtgtgtctcatttcaatcaattatcacagtttttcatttactatgtgacctggatcatctacactctctgcttccactccctgagtggctaccctggacccaagctggctgccatcactcctttggttcatctcgtctgggacatccagggcaagcagcactcaaccgtgaagcgtctccatgacaagtacggagacgtggtccgcattgccccgaatgccctcgtttaccgtgctgcacccgcttggaaggacatctacggtcaccgcaagaagggacataaagtcttcatcaaggatcccgccttgtatgcacccactcccaacggtgtcaatgcaatcatcaccgccaatgaggacaaccactcccggatgcgccgtttgctgacccatgcgttttccaacaaagccctgcgcgagcaggaaggcatcctccagatgtacgccagcatgttcatagaaaagcttatgggtctcatgggcagtgctgaatcccaggacattgacatcacctgctggttcaacttcaccaccttcgacctgattggcgacctcgcatttggagaacccttcggctgcttgtcaaccagcgaataccactggtgggttcggattattctggatgctgtcaaggcaagtgcctacctcaaggtgttttggttctaccctttcctcattcccttggtccgcgtcctggttcccaagcaccttcttgagaagcgccaagccagcttcgacctgagcgttgagaaggtccgtcgtcgtcttgccctaggtgccactcgccccgacttcacttcatacatcctcaagcataccaaggatggaaagggaatgtcgcctgaggagatggatgcaaactcggcggtctttgttctggccggcagtgagactacggctgccctgctttcaggtgtgacatactaccttctgcgctgccgtgacaagtacgagcgtttggtcaaggaaattcgtggtgcttttgacaaagacggtgacatcaagctatctaccctcgtggatctcccgtacctgaacgctgtcctgactgaggcaatgcgcatctacccgcctattccttcgatgcttccgcgaattgttcccgaaggaggcgccatgattaacaagaaatatgtccctggaaatgtgagtacagtatgccggtaccggtgtaatgtggtgttttgtggaaatgtactaagtgcatggacacaacacaacaaatccaatttcttagatttctcaatactaacaacaagtaaatacaaacaggtctccgtctctatgtcgctttactccgccttccatgcagctgagcacttcaagaatcccgaggcattcgtcccagagcgctggttgaacgagtctgacgagtacgccaacgacaagaaggaagccttccagccctactcctacggtccacgcaactgtctcggtcaacagtaagcatccattcccttactatctactcactccatccgtgttttcccctcagtcgtgcctaacagtgtttgctaacattttaactacagcctcgcgaacgccgaaatgcgcctgctgctcgccaagctcttgtggaacttcgacctggagcttctttctaagtctcttgactggactgaccagaagaccttcgcgctctggagccgccccgagttgatggtcaagctcttccgtgccggtgctggttctgcactctaaattcacgaattcatgagacaattacgagatctccttttaacagctcatcctgttgtgttgttgtctcaaccgtgaaaaagcattgggccgaaaagcgtttgtcgaaaatctagcaatggcgttttcttcttttgtctcggggttgcggctgggctgtttgtttcgtcctccctgggattgtcagtacataacatatgtacctagtcatctgtgggctactcccccggtacaaaagattggaggcatttgaaagtgggctttcgctagaatagaaaaatcaaaatcaaaatacagtcttctgtcatggtatggtcacttggccggaaaccgctagacagtttattatggctgttcaaaaatcgtatttgattattctcacttttgaggcaaagcaatatattttgcatgcaatatagaatatgaagatattgtatatgcaaatcccttgtactggtgaggcaatgcgccttttatctaaataactagccccaagcccacaatatgtgaacaaatgataactcctaaccatgcaaattacaaagtccatgtaactcccaggcaatgctttttcgtatactaaggaatcatcagaaaaagtcctgttcactcagccatcgcgagtccatcgcgtaggccaccaaatccgcagcgcaacacatgtcttcgtgtccatgctccaagtcgaggagctcaaggacggcttttagtctgccctctagtgcttgcttcagccgcgagatactagcttgcacgtctttggactgtctttccttgagggacccggccatgttttggtctttccctttggatgtctccggttttggtgtcattctgttgggcgaacaaggcgcaagagcctttcgctgtggctgtacaaacaatgcttcaggcttgcgatttttgaaaagactctgaagcaggaagagtagccacaccaagttggtgcgtggagagtattctgcccagatgccaggaatatccgctaccttttctgtttctatagggcaaccagtatagagtgttgcgcgcatactgaattttaagttagcaagttggtaaagaaagcaaatcagcggagatagggtaacatactatcggtaggtgtttcgttgcataatctcgtcttcatcttggccaatagcatcgaacaattgcttcttgtccagatcagatgatgcaacctcagtgagaccagcggggtcatcggtcaggagtagatccgctcgagagagcgagtagtcaataatggtagtctcaagggagctgattccaaacccactgcaggatgactgtcgtgcaacatcaaattctgtggggggatccaagcaaccatcttcccgcgtagaacgtatacaaacatttcctaaatgaagatctcgatgttcgaacatagcatactcctctgcccgggccagagccatggcaactccccagaagatatcatagatttggaaaatcgatgaccaagcgaacttctcgagttcacatcccgcatcgtccatctccacgattgcccatagctgcgtatccggataagctcttttgttggatggattgggatttaggcagtcatctttggttttcttatagtggtcccatgcattttggaacgactctgggaaacgaccttgaacaacatgaatctctctaaagcgagcaaagccagggatcgggtccaaatatttgagcattttgacctcggaaacaatctcgtcgatggtggtgaattttttggatcctggaccgctctttgctcgcagaggcacgaccttgaagactccatcgccatatgatttcagtttagccaactttgacttggacaccaccggcctgcaagcttcttcccgcaggtgaagcttgtaaacttcaccgtaggatccctctgcgagttttgcgacgtggaacatgttcgctgatcgtgaggcccacgagctgaacttctgaatgccttgggcggcaatcggagatagtgcctcattcagaattgggctaacataatcactggccttgctgtcgtgaacaactccagatgaccgtcttggtgcaggaatcttttttctttccgctcttcttctggaggatgtacttggcttttctcgatcctcgcttgtggactctggcatcatagctggggaatctgggatggcttgaggaagtattcctggattcttcgggcatatcctgacctccaccatcgtttcgcatttcttcggttctagcttcgactgctccgagaaggattcgaaggaggatcgcggtgtcagggtgtccgaggtatcctctatcgtagacggactcgattcacccaagggaatttccgtcaactcttgctcttgctcgctctcagttttgataggctttgtgtaattgtcttgttgaagggttgagtcgtcatcgattgccacttgggctagtttcgcttggaggctttccacggggtcgagatattgggtcttggatctggtatctctagcagggcttccatgatcaaatactgccctaggggcattggctcttcgtttcccgtacactctgcgctgagctacggatttgggtttggattgtttgggttccattggtgtcgcgtgactcgagactggcgagtgtgaccgggttgacattgtcgaggaatatttatacactcagtatactagccctgatatgtggaatatccgtgtaagggggttaggatgattctgttcgacaggaagcggtcgaaagagacgatttgggccagaagtgatggatcgtgttgatgtttaacctaatcgggattagcgtatggttactgcggtgaaaacattctgcccttggcctctgggcttttattgtactgttttacggagtatacggggaagggagtgcttcaattgatgttgctttggtttacagactattgagtgcaagaaagctttatgtgattgtgtttgaacagaaatagttggcttatgttcagtaacaaggcagaagtccggggaaagggtatacttctccaaccctgcctcattttatacaagggataaaattcttattttcatttcattgctctgtccctgagacctgcactttctctcggagtcttctttcccttacatcgtacatgaaacgaacgtgggactcatactttaagatctgcatccccgtggctgtttctgtacgctggctgcactgcgtatagtatgacaccttcagaaacatcccgtgtttcccccccctttctccagattccgggcaacacggtcataagagagccgatagtccaagagtctagatacgtgcagcccgaataccgtggacggtgaatggcccaatatcatccacagtggacatgacgccggggctgaccggaagtggtccctgagaagtcacactgtgacgtaccgcccttgtagtatccggtcgaaggaatatagcataaacgcgaaaaagaaacccaaaaaaagataagaatacttagaatgatacatccaattaaaaacgaactgaatagtgaaacaaaataagcttaatgaagaaaacaataacagaaaagtccttaagtgacccggaagcacgcgcctcgggtgctttgccttttttttctgctttttcgttttccgcctcccgccctccctctctcttctctttgagacttcatccaatgtccttctaacactttttaatcctttctcgatgcttgggcatggcgttcaacttcaactggtcgcctttgatggcggacgcgagtttttatactcgcgcccaagatctgcttactgccgcacttaacaaatcgccaaaaccccccataattgtcgatgatattcacgtcaccgagttgaacttgggatccatcccccccgagctcgagattttggaaattggggatttggccgaagaccgctttcgaggcatcttcaaaatgtcctatactggtgatgcctttctcaccttgaagacccgcgttcaggcgaatccgctcaataccttcctgctcacacgaccaacttttggctcgccagtacctcttgctgcagcgtaagtctatggtcccacttatctcttatttgactccaatctattagatgtgtttgctgactgtcgtgattttagtaccccgctcaccatacctctacaaatcaccctctccgacttcaaactttctggattcgtcatactcgttttctcaaaacaaaaaggaattacagtcgtgttccgcaatgatccccttgagtcactcaaggtttcgtcgaccttcgattcgatcccatttgtgcgcgacttcctacaaaaagaaatcgaagcccagcttcggatattgttcatggacgagcttccagccatcattcatcgactatcgctccgtatatgggttccggaatatcgcacaggggaggaaatgaacgacgagaccgataacacagccaagtcaagaagcgaaggccctggccaagatcctctggctagcccgccacaggatcccgtcgactcactcggaaatgcattgaatgaatccgaaatcgcatcgctctctctagattcatcggtcgagacccactcgcttttctcacaaaagaacctccttcgcttggccgctctgacagattcgcaacgtacactgtccttgttcactccttcgatcgaggaagtggtgtaccgagcatggacttctccaatcgatcccagcgaattttcctcgagcgtgatctcaccactgagcccgaccctttcacgaacgcattcccaaatgggaagcatgtcttcccttcatgaaaccgccagcactgtctccatgcaaagtcgaccctctatgtccggccattcattcagtactagtacctatggtctgagtctaggcgctggacgtcattccaaagctcacgcccggaagcgcaagaagcgtgttgtggacctgcgccgccccaagacaactgatgacgctatgagcgtcggcgatgagaacgtcatgaccgagtcctccagaacgccttctatcgcctctgcgcctctgcccgttgtaaatgagccgtcagatgacccagtcacaccacctctatcacccgaagccgactcccatttgcccattatcccagaaaggcatttgtccaacttctcccgccccacacgtcgggatggagacttatcatactcccatgagactatccgtggacccaaagcagaggacgtgcatgtcacccctcatgctactgtgcgtggctatcccaatgagaaggccacaccggggccgtctagcaatcaacggaccccgttgcctacgacattcaaagacgagaatgccaacaacgaaagcgtcgattccgtcctggttgagagactcgccggtgaaatcgctcgtcgaatgcgcgaggacaagcttatgacaaatgcatgcagcggcttctggagtcgccagcgtgaagacagccctcccccagcgtacggccactgagcactcacctccatatatcttctacactcgagcaaccctcgagcatgaccgttacgatttccttacttctccttattttgtcttaccgtttcttggttgttcttttgttcttccttttttggggcttaactgatatttctttggagcgggagtgtacaaaattgggtcctgtcatggtacagctggcgtcgagttctgttcggggtttcatttttacatgataccacactcattagccattgtttttttatgtatttcttatttttaggcaggtcatggggtacctagagcagatgagatggatattgggggtctaaattatatgaaatatgtttgttcccaattgctccaatcgctccaatcgcctaaatcgcctaaatacctccgatgcgatgcgggtaaaaaagctggagacagcgctagaccgggaggaacttagctccgcaccgggcaccgtgcaccggacatctctcgattccttcccactcctttcccttccatccatatcacaccaattccaatatggcgggcatgttcaagaacgtgtttggctcccatgaggctaagcccgatgatggtatgttaattgatacatctcaatttctgagctaactctggtagacttcgccgacttcgtggaagctcccaacccgtcgcctgcctccctcgtcgccgactcgactgtcgttccagctgccaacacactggccgccaaggccgtcccctatacagcctggtaccgggtatgggagaggacatccccgagcgatttcaagcaggaggcgatgattatgccctttatcctcttgattgtcctcttccacctttggggagtgcgcaagaaccgaaggagggcgagggactgggcgcaggcccacgtaccttctcttcagaaggagtttgccgtcgtcggattcgatggaatcgcccgaccggctgccgtggacgggatcaccgtggagctcgccaaccccgagtcgctgctgaaggagaagaccgcctccgagttcgccgcgtatgcgactggccgccaaaacgttgccttcctcgacgtcaacatcaagatgcccaagcgatacaaccccatcaccttcgtcatggagtatgtcttgggcttcttctttgagagctgggagccccccgttgagaaatacgaggctctgctgtatgctttcgatggcaaagaaaaggacctggttcccgttatcgctaaggatgcttcccctgttaagctgcctagctcgacttacgacggcttcatctgggctgttgtccacaagagccatatgcgcaagttccgcaatgaccgctacgatgcctctatcactttctccaaggataatcctaagctcccctcgtgggttaccgtgatgactgagagtgccgagattagcgatactctcctcaccccggagttgatccaggccattgagcaggctggtaatgactttgagttcttgatcgtgacggaccagcctgtcgacagaccgaccaagtaagtagcatcagtgcgaggcttaaatcggattcgttactaaccaatgtgtgttcctaggatcgaggagaccgtccccaagaagcgcatccagctctccgccaacctcgcctcctctgcatcaggctacgcctccaccctccctctgttcaatcaattcctacgcttatctgacaagctggtcgcctccgcccatttccgtggcgaagtcatgcgcaaggtccgtaacgtccgcgaagaagagatcaagaagctgcgacgtgtcgacgaagaagagaaggctgaggagcgccgcattgccgccgagaagttgaagaaggatgagcgtgagcgcatcctacgtggaatgagcgccgaggagcagcgcaagtttcttgaccgcgaggctcaaaagggacagaggcgccaggcgaagaagagcacccggaagggctagatgggtgtctttcgctttggaggatttctattctgtcttctcgctcctttctgtgggaaaggtgcgggttgaatgtcttatcctgcccttttgataccttttttaatttgatgtattcatatttatttgtggaagatatgatatctaccatgagagtgggatgcaatcttcatacgttcaactatattcaatgcagattttatattcagatcattgaggcctgtgtctgatttgaattccagggaagtaacgaagtagatggcgttactgccgtacatctcgtcaatcccaacatcccaacctcaccccatcactccaatccagcatcaacagtcattccaattactcggttatccttatatactctgacctgtttcaatcattcatcacaatgcatttccttgcatttccaatctcattgctcctttcagctattaccctatcccaagccgctcccacagggaacagtatcaacgccagcacaaccaccaataccacccagctcaacgcttccagattaccatccggagccattatcacccgctgtaccatcccggacacaatcgccctcactttcgacgatggcccgtacatctacacatcccagatactagataccctcgcccaacgcggcgcaagggcaaccttcttcctcaacggccataacaggggaaacatcgatgcatcacccgagatagtgcagcgtgcattggcagaaggacaccagttgggatctcatacgttcgtttataccacccactggcttactctctcttccccagcccagccagtccaagccccaacatacacttaccaaataaccgtccagatggaaccacgcctccctcgataccctctcatacgaagaaatcgtataccaaatgacaatcctcgaagaagccttcacacgcatcctaggcttcttcccgacctacatgcgccccccgttcctcagacacacgcccgtcgttctcggcgctatggccgatctgggataccatgtcattggggctagtgttgatacaaaggactatgagaatgataatcctgatacgaattgggttagctttgaaaagttcaagagggaggttgatgctggtggcaccattgtgttggcccatgattcgcatcagcatacggttgagattttggtggataatatgcttgcggatgttcagagaagggggttgagacgtaagttttctttttcctttgtgtttgtcggtggttatggggtgaggctaacgggtttctcttatagctgttcctgttggcgagtgtcttggtgatccgtctgagttttggtatcgtgctgggaggtagatggtcaaggttggtgggggtgtgttttatctcgtggttggtcttggttggtcttggtaattgttctttttcgtctttgtgctggggtcaaaggggtgtctgtgtatagaactcctaggtttcattgaacttctgcgttattctttgttcttgacgaagacgttctatatatatgcgcactcagtcaatttaatccaggttatcagcctggacagcctattttcatataataccagtgtctactgtcatcgtaggattagcacgcggtcatcaacacaatccggagaagtgaccatctagtatataattgattcgcttcgctccgcaatgaaatgcaaagattgtgggtactgttggtatttgtattgacacagtgagattgctcacatgcagcttgtcagacatttgtttgcccatttgtggtcctttatggattccaggcctttatacccttgtccccatgacgctatttaaaaaacatcatggtactactaagtctatcatcagcaatatatcttcttctggtcgcacttcttggtcacttaactatatatcatcgtctgtcgagttatatcatgccgagtgtcaagctcatatcatgttcgagccatttctctctctctcgcagacaacattatattacttggcacttgctacccactgtgccctttgatgagagtgtctaaggcactcagacacgtgtgagtggcttctaccattcttcttttgaactgtacataatctgacttgctcaggatgcacacagatcgacaacccatagacctcgagagtacaatcccaaccgtcgatggtatgactcttttctttatatgtggagatcggtatacgttgaggaactaattctgtctgtttagaaatatagcaacggcatcccaaaattcagagcatccaattctcagaaggctatgtcgcgtataagttgcaatttctcactcatctcatcgttcgaccccaactccgataaatttgggttggaagcgcaaatagtcagagccccaagtcttccaggtcgtacattatttgactttgatgccagtatcgccttgctcctcccacatattctgaattcgttcatccccagaattgaggctgtgggccaggttcttggggcagtcctcagggcgagcgtgaacactcgctttgctgatttcaagtcgaccagcactggctatatatacagacaccgcatgttgtatactgttgcgtggtgtcccggttatcctagaagccgtgggtgaactgaaagtcccatggattggggcacacttggtgaaagagccatttgaaaacgaacgaggtttcggtcgtgtgattggacaagtggtcgagtatatgattgatcaaggaacactctatagatttcactccacttacgatgagaccagctcttacgccaagtccaggtgaacagagtttggagagtggtgtactggtctattatcgaaaataataacaaaactggagtttcagccaagtcatcgctagtagtagggcaccctgttcgaacccccactctaattcgatctatataaaaagtctatactccaattcctgccccatctatatctacatagaacctacaacttcccaaaaatcttaaccctctcctcaacaggcttctgtaccttctctccagcagcagcttcagggctgccaaagactagctgcgcaacatttcgccactcgttgggcagaccccactgcttcgcagtagcagcgtcaatgagcgggctatagtgctgcaggtttgcaccgaagccgagcgcttcaagacctgtccagactggtaatcgttagaatgggggaagaagtgaaacgaagaaagaaaagagtaaacatacggaagtactgatgcatagcattggagtggtccgcccacggcaggaaattatccttgtatgcagggaatttctcctgcatgggtttgatgtgtgctgggtcttcatagaagaggatctggatattgattagctatggacaggactaaagatctcgagttccaggagacccaaaactaaaagctcattacgtaccgttccatacgcccccttgaaaccaagcaacttgggcaacgtctgcttttcccaaatctcctgtgggattttacccgtcttaacaagaccctcgaaaacctcgatggcgatatcccacagtctatcgtgatgatcgtgcaggagtacgactagccgcgtagactgggtattgaacgcactggggacatgcaagatggcggcattgacaagctcttcgatcttagaatctgagactggacttttcttgccgagcttatagatcgtgcgcctgttcttggcgagatcgatcaaagcgctagacatgtttgttgctgggggtggggcttgcttgtaggttgaggaggagaatgagcggggtgtttgtgtttggggttgacagttggatacaaggcgtgttgtcctggttctgaataatgctgcgcgggttatggcgagtaggggggattgagtgaagcgagtggtcattttgggggttcggatgtgttgtatatattgtgttttgtggatgtctgtcttttatatatgttcacacagacttgtggactcttgcttaccactcaattgctaatccgggggactcggtacgcttgtacccggtactccgtaggggcaatttccgccggccatcgtgatatcgcggatttacggatttacggattcaactatttatagataactaagcagttggcttagtcagcagtttcaaggccttgacccaaacccctcaggttggctcgtgcagaagtctaattactaatatcccgaagaagccccacttcgcgataagcgttgaatcctcagtcattcttcatacaatatacatattcttccctctaacatccatacatcacaaaatggaccccaaggtcggagtcggcgtttttgttctcaatgctgcaggcaaattcctgatcggtaagcgaaaggggagccttggcgctggtacgtgcatccaatagaatactatacatgcaatagacctcaattataatcaaagcttaccatttgtgattaaaggcacatggggactaccaggtggacaccttgattttggtgaattttttgagacttgcgcggcccgtgagactctcgaagaaacaggtctgaagattcaggatgtgcggttcctgacggccacgaattcaatcttgaaagcggagaataagcactacattaccattttcatgggtgctgtctgtgaggatggtgctgaaccccaggtaggttgattgaggtttgttttatgtgtttatgtgtttttctgtttttatatacccccgtctcgtggctgcgtacactgcaggaacagaaccaggatacgcggcttacttcttggtaggtaattgagccgaataggtgcgaggggtgggaatggatctcgtgggatgaattgcgggcgtatggggaggagcaaatcaaggctggtgacgggttcgagggaagaaggttcttttcgcctcttttgggattatttgaacaacgtccggattttcgagtttgaatattcagcacataggccgaaattgcaattaaacaaacgctctgtgtaaattatggatatctgataacccggatgctgtaaccaaagcctcatgattcattctctcaccctgatccttccaatggagacaaccttgaagctttgttaagatccaagtcaaactaaggaacatgcgagccagaattttcatcagcagtccgctgaatcctcactcgcatgacaaaactcgaaaagtatgatcgcactgcctcttgtagccatagcgggaaggccctcagcgacccaatcaccgaggaatgtctaggcaggacggttagcccacttttccgattaacaaggtgctccaccactgcctgcgagacgtcctttggatctaggagtggttgatcgaaagcagcttgatatttagtgaagccttcgatcatgggagtctgaacccaaagggggtgaatggtactaggtgtggtcagcataatttctctttgaataagactttgccagacaaacctcgtccgcacattcggagctttgtaccaatatttcaactcttgccgaaggccttcctggaaagaaagagcggcagccttagaacaagcatagtccaccatctcgccgagagtaacaaagctcgcaacgctcgctactgtaagaacatggccgcggttcatacgtatcatgaacggaaggaattcttttatgatgaggaaatgggagatgatgttgacatcgaatgcctgacgcaattgctcctctggcaaatctagaatggtatcatgatggaaaatagcagcattgttcacaataacagttggctctccgtgtgcctttcgaatagcagcgccggcttcggaaagagatttggccgatgtcacatctgtttgatagaatgtgacgttttctggaagctcaaaggtaggccggatgatatcgaggaccacaacgcgtactttattgcgagaaagatcttccattatttctctgccgatgccaccactgccaccagtcaagagaaccagctcattctctgggatccatgcctcgctgccttggaagttgtttatcactcgctctgagatctttgtgttgaggtagtaaagacctacagagccaactaacacactcagcgaagatttgatgatcggtgtatccaagagattaaacatggtgtcaagggagagttccgatagtcacacacaaagtctgagtagtcctgtaaaggtccaagaatgagaaaaaaatgaaagtcaatctcgggcaatttggattctgcagctgacccatttatattggaggaggggaaagggcggctattttaacccaagatcagcagcaatttctgcgcttgtgttgcacaggcctttggttcccgagtgtggctggctgacttttttagccaacccgagtagaaaaggagcatttcgctgcgaataccgaggttatcatcgcttcttcgaggcacatgttcatgaacagggtctaaaataacgaagatccgatgcaacacggagtcaaagggggaaagatccttgcattccaagctatgagtaaagaagaaggacgaatacatgatcttatcatgccccacagggctgataaacttcaatggctctcgtgttctgcggcctattgtactggacttgaaatcgtggccaacaaatgatattctattatgagagccacttgaggcgtctcggtaccactcctaaacgaactagatcttacggttgagataatttgcaaagataacagacactacgacattggcctgtttagagtgaaggtcgtcggcctcgtggaaagaatttggaagccttgcctcaggtcctgtttgattttcgagactagacgggttcgctttccagattgtatttcagatgtaagaacgagagagccatggtagccataatggatagtgagtatgtgtatatcaggaagattcacaagtgaggattcactcttttataccatacagcaaagcaacggaatttgagagaatcttgggctatagtgaatttgatagagaaccagcttctcaaatacctgccaagctcaacacaggaactggaaacaccttggcatttgcttgatttccctgctttatacttggaagagtgaagaacaaggagcttaatcaactcgagccaaaaacccagtcagatactataacagcgatagtcacaacctgtacaaatatcagtcaatctatacaccaagagccctgaagattcgaatacgcaccaatgaaatatctactccaggcattataatgacatccatagcaggtcgatacccctgtctagagcctctcatcaaagccagtttctcattatgacgaatactctcccgaatttcagcaaccttcccatccccatcaacgacatcaaaaagcgccagcgcattcccatgccgttcaatattcagagtaagcattttctcatccccgagctttccctcgaacgcagccgcattttcgaacgaaagagcaaaattcccaaacgaagtattgcccaacgtccatcgcggagtgccagtagctatcgtggcagtatcacagcctggcaagctaatcgaccaactattcgtccacgacaatttccggtgtaactcgaagagcggcagacccgatttatcgcgaaactcccgacacgagcgatcggtgtacttgcgaccagtcaccgtgaactgtggtgttccatcctcttcggtgatcttatatgcgacggcggattgggggctgccaaatggtctgagcacgagggttgtctttgagcgcgctatgtattggttccggaaggcgatatcgcggtctggcgatcgaaggggtttgcggggcttagaggagtatgagcgcgatagtcgagcgtcagagtaggaggtgtaggacatggttggtatgccgtgtttaatcgcaagacggacgcgctgggattatgcggggcacctctttatactagggttgggttgcattggtgtatcttgcgctacttatccctgttgcggcatttacttcggcgaatgcccgatgatctcactgattgctgagccaccggatgccaagaaacatacatgaagctattcccctcggggcttcagcggggtaagtggaatgatgatttgtggctacatccggtttcgaacgacgcatttatacctagccacctcttatacccctctcagagaccaatgctccaaaatttagaaactctgccatcccatataaaaagcaacatcggatgtactgccccggtgggggcctatatctgctgagtcatgttccacggcctccggtccagggctgtctgttaggcaaccagctaagtatcaaccacctgagtatcatcacgatcgatactgttatacaaacatggggaaattcaccgtcaaatctctagaccacctggtccttacagtccatagcattcccaaaaccgtggcattctatacaacatatctcggcatgcgacatgagacctttacctcaccaactaaccaatccgttcagaggtaacccctcttttctttacaatcttagtggatgttcagaggcattgacgataatagacatgccctcatctttggctctcagaaaataaatctccaccaatcgggcaaggaattcgaacccaaggcccaagatgtaatgccgggaagtgccgatctgtgcttcttgaccgatgagaatgtggaaaaggtcctggaagtgtttcaggatgccagagttgaagtatgaatactcggctttttcggatgcagatggagactgatctctacaggttctcgaaggtgccaagattgtagaaagaactggggccgttgggaagatgcgcagtgtatacgtgagagatcctgatggaaatcttatcgagtgagcgtttccccttttctcttggagtactccgttgactaaccccagcgacagagtgtcgaattatgtttgatttatcgataaaccgactgtgccgagacaatgggatagctattctcatagcgggaactacgttatgggcctgttttccctcctggtgtaatagaccttatgaaagtagaatgacctgggacagcagcctgcagattatatataggcaagtgtatccctcaaaccccaaatcttatgatctatacaaatcggaaactcgaaatgtattgatattctaatgcattcttaattctgttgcaaaaaaaaagtggtagaaaatcaactcctctcgagtctttggtacgaagagagatacgcattctcagatatcaatcggaatatccgggcctctgtaaatgcttgcaaaatcgccctcaccatgtaatggttcaagtcttgcccatagtgggaagttgaagtttgttgacttggacatatcgcatctcaaattattccaagagccgaacattgcttctatcccaatcagtctcaacacctggaagttaagtttgagctctcggcagtctatgaagcatcggagtttatctctgaaatgatagacgttggcacactgctgtgggtcccatgcaggtaaacgcaagacttcctgataagacagggagcctggtcttcatctaagtgtctcgggttcagattcaatgcaaaaacctctgaatacatatctctcaatcaatcaaagttcagttgacctgcgccttcttgatgcaaaaagaattggctgatctttgagatgatcggcttcgcctagttactagcgcactgtcaatatatatcatcattgagtcttttacgccacacaaggagtagcacaagctccgtacctatggttaccaaggattggtcccgacctcttataggaggagcatagaaagtaatgtctaactataggccctagataggtctatacaacccgttcacgtccgtactctctcttctatgattacatcctattccttaatagagggaatggcttctaactatattgattttcgagactgaatgggatgtcgatcagggtggggtagagtcgctgaccgccatgatattcctaggtaagagtgatcgtcttccattcccctcacctcaccgttatctccagccttctccctgctgagtttgtccctatccaaattcctgtggctctccatatatctgatctgaagtgccctaggattacaaattggtccttcagatcttcagacaacccacttcaattgtatccaacatgccgtggcgtccagacgagcccgtggaacttcccaatggccgcctagtgtgcagacagcacggactcgtagtttgcggctactgcactgtggactacagcttcatggacgacgatgacgacgtagaatccttagactcaagcgaccacacggacggcttcgtcgctataccgagaacaggctcagagctcagagtcggcacggggggcgtcttccccacgaagtttatgcccccaaatccaaatgataccccgaagtcgcttttcccactcaccaaatccgagaacgccttgccacctgtatatcggttcattcgccgcaacagccaaaaaacccaattcctggtttacacggacggcgcgtgcttagacaacggtggtgcgaacccaagagctggttgctcctttgtttacaggaattctacgacgaaccccctactccatggctttttaaatttccctctcgagaaaagtgggcccactggtatcgcgaacctgcaaacaagcaatcgggctgagcttcgcgctgtcattgcagctacgcgctttcgctactggcttggggaaggatgtcgctgtctagtcatcgctactgattccgagtacgtggtagagggcataacgaagtgggtgaaaaattggatacagaaggactggaaaacaagtggcggaacgccagtcaaaaataaggacctttggcagtgtttactcggggagatggaacggtgggatgacagaggaatgcgtattcaattctggcgtattccaagagaattgaatacagaggcggacgagcttgctaaattagctgctgataaggatggccctcaggaatttgaggatatcaagggcgtccttgtttgagggcatacgagcacagagttgctaagtctactagccggcaggttcaatgagaagttgttctatctgtacgtaggaattgggcatcttccagatccatctggattttactgttgcattcgattgatctcaatgttatgggttaaaccgaagcgtttaaatcgtgttgaataagcggatagctacctgcaggctgcagtactagcccaggtcagcttaggcttcgatgactcctttctacgatatcagctgagtgtggcatttttgcaatatttcatattcgactaaacgtgtagtcattacagaataatatgaggacacctttgcccaaaaccaaagcgcaaaccctcaaagaagaccccgaaaaaaatcctaaaagtcaaaaaaaaaatactatacaggccaaacgactcatggtatctgttgcctctggtcaaataatcaaaggaatcgcctttctagacgaggttggtataagtctcatgctaaataagactgagagggtcttcgcgggctatgtaaagcgcactcgcccgaagcttgactgatattgcttccccgataccagccctggtcaatcagccgtgtttccaggtctcgccagtagccagctttccccccagcgcctgttttcagatcgagatcaccaagacggatctcaacaggtgatttttcgtcatgtgggatctgtggatcggtcagtattcaaatctagatcatgtttcgcaacagacaggatcttgatgttgactacaacaaattgattttgcagcatgaactcaccttgataaacatcgtacagtccctcagcgtcatcgcaagcgacatctcccgggactgcgccgccggaccctgcagcccgacatccctttcggtcttctgcagcgactgcagcctctgtagcgtcgggttccgatataaaatgtgagctagtcgcgatctgtccgtgcagcctttgataaaccctgtcgctcgcagaacattctcatactgctcggacaccagatccagcggacagaaggaccgctgctctttcaggcctaggggttgcgactcgcggtttttcatctccctcagcgcacaagtccggcacctatgcgctgtggtaggcgccgatggcgattgattgagccatttgggtttcagctcggctaggctcgcgcccgggtcttcggtcgttgtcatgtcggtgatgaggagaccgaatcgctcatgtagacagagatagctgccatggcgtttcttcggacgcgtaccgtttaattcggcgatctgaagttgcgagttgcagctagagaggagaccctctgggagtctaatgagggtttggtcgactagttcctctggtttgaataatggtcggatgatagtgtcaaagtttctagcaatctctttgtaggagatgtcggctgcagtctctttgcggagtcggagcaattttcccttgagttgggctggtaggttgcaatgatcctcgaatgcaggtggagatagtggcctttttgagtcttttttaacgagtactggatttccaacaaatcggtaaatcacatttgctcctccctcggcgaggtaaacgagccgaactcccgaggggagttcaaggagattgggtttggtcatccgttagaaggatgggcgttgggctggaaatcctctgcgatcatgacgtggctgatagtagacaaatcgatttagatcgattttgttaactccgccaccgacgataatgcgtagaatagaatctaagatcgaaaggttgggaatgtgaaacaatgctttaatgaattatgcagatgtatccagtggcgagaggctcaaagtggtccaaaggggttaaaccgagtttagtcggatctcacttccaggctggggtgtccaatcagcttcgaaagcgaaattcaactggcacgtctaagacattcaccaaccgaaaggagtaggattcgagaaaaaaacggagattccggacaaagaagcccgacattgactgaaaacccccggggcaagggtttagttgtggggactcaataagagtgcgagtggcgtaacccctagagtcgatcatagcaaaggagttaaagggtctaggaagttcgggacatcatgaaatcaaggaacctgaaatcatgaaaaggaagatctccatgaagttgtagaattggaaatccccagattcagaggagaaaatccgatgaagccgtatttaaagacaatggcggtcaggaaatcggatatttcaaattgtagagatgcagcgagtgagactgtgcaggagccttggaaagaggctcgagggtctgtcaatatcagttgggatgtgaatctgcaaatgtctgcaataaggaaatatgtcaagatgagtgaaaaatgtcgtaaatgtcggaaatggaagttcaaccctctatggcgtgtcactgaccacatcctcatcatttccccgggttatactcatctcatctctcctcatctctccatctaatctccctcctacatcaccccaatatccttttaccccgccatttcaccatcaacatccaacatggccactatcgcaacccccgcccactgtatcgccgacttctgtctggtccctgtaaggaagtcacatgctgctattcacctcccccgactaacagcataaccccagatgggcacctccacgccctcggtctcagaccaagtcgctgacgtccatcggatgatcgaaacatgcggcttgaaatatgtcatgcattccgcaggcacaaccctcggtacgtatggagtacatgtctcgaggctataatacgtactacactatgcatagtattgtagtactacctcggccactccggccccattccggttcctacttgtgtagaacctgctcctctcatctccaactgtgggctgatttgtctctacggctgaaactaaaatcaccggagaaagagagagctgagagctgagaggcccgtgtgacactattcctatacttactgacgttcctggttttgtagaaggaccttgggatcgggtttctcaagttatcggacaggcgcatacgatccttcatcagaagggaattgttcggattcatactgacattcgcgttgggtcgaggtgcgttcatctgtttaatgcctccatttctcattgctgatcgtctttattaggaccgataaggtgcagtcgtttgaggacaaggtgaccaaagtgcagcagttattgaaaaaatagaggagttcaactccgaaaggcaataaaggcaattgactttgaatcatctcattcgttaaactatatgactagactagatatcctgagcttgggggaaatgctgaaacctgccatcacatcccaattccaacccaaaacgccttgctcttgaatggaagtgtcctatatccctgtgtaccgtccagtcagggcacagccccatatcgcaggactcaaaagatatccaagaaaatacatccgaacgcttcaaatgtaaaaaagcaaagaaaccgaggtcaaatcactcagctcagaaggaaattcccccaccgagaagattaccccagttcccaccagtccaaatccaatttcccatagacaccgacgtgcccgacttcgccgattccgcaagcttaaccagcgccttgaacacattactagtagacgaggcatcactagtcgaatccgccgaagtcgagacagacgtgcggccaaccgcattggtgacattattcaaggtatcgacagtatcgatcgccggaccacggttgaagaagtccaccaagatataggtcggctgtcgcccactccacgcctccttgcaagttgtcgccgcagtgcccaggttgcccgttccgccggacgcggcgttcgtcgtggccacatagctggagttcgggtactcaacgtccagtatcgcgaggctgctcgagtacagaaagtgattcatcaatgggagaaaattggctgctagtgccgatgcgctgttgtctttgtatgccgacggtcggtccacctcgcatgagaagttcgacggggaggatacgtcgtatggattctcccagatgtagctccattcatccatcaggtaggggtaggtggtgctggtgtctagtgaggccacgaagacgacgaggcgcttgccgtcgtcgatcatggtttggagggttggccaggtggtcggggcggtgcctggggatgtcggctcgtaagcgtagtcggtaatattggctgttgtgaattgggtgttgagctcggaggctgtggcgtcgtcggagttgactaggaggattgtgatcactgtttggatgttagtttcctttctagacgtcgtcgcggaactaactcaccctcgttgggattatcatccaaccacgtcttgatgtccttcagccaatcgctcagcaaccccgcatctagcaggtcgcagctggaatggcataggcgccattgtgagttgctcttgtggacttgggctgttactaaacggacacccgccgatagttgtgttggagtgtcgtagtactggttggcagctagcgagttgccagtatcggagtcacgcacaaaaggactatcgtgggcgcccagatgtgtaatttctccataggacttggagcagagatcaggagagttgttgcatgctgtcgtgcgcttcgtctggaccaaagggttcgcaaggaccataggcaggaatgccagaaagttggatactcgcataactgtacacaaatgatgtattagatgtaccaatatacttcaagattagaaagaaagatcaaatagaaataagaaatagaaacacaaaacaaacagaaaggagacacaagacctcaaataaacaaaatatttgtctccaaggccgcgttgccctctcaactattcttagatcggtggagcagcaactgcactgccattgggccatttacaccaatcgacctcctctatttgtgacatagcccacttgtctaggcataactattgtgtacggttttatatatggtttttcttactgacccttgacgatcaatgtctcaactgcggggaatgacatacgtgtacggagtatgttgtgcgcagattctcggataatatgggtattatgatcaattatttacgtatttgctaatatacaggcgattcgcaactatcatagtcctttaagcgacaaacgtatacccggggcgcgtcgcttcgttctgcttgctcgtggcggattcaccaactgctccaagttctgttccatcccatcgaagagagatggatcgccccaagcctggaacacatcgttcaacacttgttgaaggggatacgggttacgccgtcgcagcatgcgattcatgcgccgcgctgacagaatatgatggctgtagagcatggccagccggtggcgaactgcctgtgagatcaatcgcttgtcaagacgaagaccggatttttctagctctcgaagaagaatcagcccccggacccatggaatgagcttctcgtccgtttgggaattaggtggggggatcgcaaatttcgatgcggtagtgtccaatactcggaacatgaagccccaagagacgatggcggcttgcatttggggggtaaagacgagatcgagcatacgccgatcgcgaccgtttgcctgcttggcgggatcaagaggggatttggaagatggaaaattcgcccaaggcttttgctccgggctttcagcgtattggcgaacgagccactgacagcaatctcggagtttatcccagtctgcccatgcgtctgccatacctagacgcttgagcatctcaacccagaatgcagcactgacataccctcccgcgggaaccacgcgctttagaattttgaagatgaagatcacttcatcgacggcagacaggcgttgacccggcggtgggcgatggttcattcgccgaggggtgagaatctgctcggccatgaaatccacgctttcttcgcccaaagtacgaccacgaagagctagctcgtcggcgaccttggatgccgcgctcaattcccaggctgcgatatgcttccgaaagtggatgtcgtacagatctggtgcgcccgggtataattctgttaacaccgctagagtcatattgtacaatcgccaatcccgggccatgtagtaagataccaacagtgattcctgcatacgcttgtcttcaagggtgtcgggatgctgatcgctgcggaggacatcggagaggagaatgtcgcggttctgagttgcaagtttctggactaagcgtgagaagacagtacttcctatagaaataccggactgcttaagtattttaagcttgtccagaagatcttgattaccgtgggctctcgtggctagttcgcgcaatgtccggtggccgatctctgatacgccgagcatcttcaggccaccaacgatcatatcgaaattgagagcacgagtggcaaacagtttagcacctatgtcatctttgaagggtgtttcgtcttgcgaccccttttccttggatttcggggctgtatctattgggccaggttgatcaatcgaagcttcggtatcaaatcgctttttgacatagccgcggagccgattgaactctttccgtagcccgaatttctcaacatattccagcaatggctgtatttcctcggggctttgtgggtgatcctgacatcgagcaaggaaatgatgcattgagatcgctgcttcgccgtggccttgctgcatgagcaccgcaattacagggccataaaaattatgctcgggcatcgtggagcatatgtcttggaatgcttgcaatcccggcgacaagggcgaccgctcgagatcagccaaagtcgcaaattccgtgccagccggaagagacgaatgcattgcagagggaagtattttcagcacgtcatttgcgctggctaaatgagagcgttgaagcttcttgtgccattcgactgcacgttttgtcaagccttgctccagaagtccacccaccacgcgctcatacagctgtggccatccgttgccttgttgctcccgtaaaatgacagcatagtcaagaacctccttaagaaaaagctctcgccttaatcccatgcccacaaagctttgccaaaagaagtccgcttgctctcctgcaactgggagccgtacaccatccactcggaccctcaacccttcccatatgtctagagtaccattgtcgccgtagtgacgctgacggtatcgaagaagctcctcccacagatcgaaattatttcgatgctctggatcgtccactaatcgcgttccaatatcgttgaggtgtccgacgttcgattcgaattcaagcttgtccggtcggagagacagaagtttgatagggcattgtgtcgtattattaggtgtttggctctttactagaggcgtgggctcaagggtgtttggttcattcgaggcctcaatgtcgtagatgggaaagctgaatggccgtttccctcggcatggatcctcaagctgatgccgggtgttattgtcgggttcctcgagtaattcttgtttggcgcttcgcgaatgacatcgtatacaccggtacctggactccaattgctcaattccgatcggtgttgctgtgagtgtgtcaaggatcgagacggcggacggcctcttcaacagtcgcagaagcgccgggcgcatgagtaattaagaaaggaaggtcgggaaatcaaattatcaacgtcaaacatccttctttgagctccccacgtcaatccaaaaagttcgttgtcgaatattcaaacgttgatacgcgtctgggcacttttctggcgcttttcccttttgggatgatgactagatgcaacgtctgattcgatcaggtgatgctcagcacgtgacacgatatccagctcattccgggaccaacttcacatccccatttcgccctcatcgtacctcacatccccgctccttcttcgcttacaaccgcgaaaatgttccgtgctactagctcccgcatggctgggtatgtactcccttcgaattgccacaataatcccccgcgcacaaacccgactttgagagtgcgcccatcgaatttcctcccacgatcttcggggtccaattacgattgacgcggctgcgggacctgtcatcccaccattaattacaatttatactgactggttctgcttagcttcgtgttccgtgagaaccgtgtgccctactaccagcgtctcttccagcaacacgatggcaagcgccaatggtacaaggtcagtacccgccggaaggggcatatgccctcaatgaagtttccggaagaacaagaaactgacattggaattgtctcgcagacctcccgctccggctacgtcatgtacccctacctcatctctgtctacggcctcggtgctggtgagtagacccgtcttccgatatgagatccggtcgaggatagaaactaatcgtcaatagctaccatgtacgccatgtgccgcatggttctcgttagtccacccagccgctacttctcatactctaacgagaagcacgagcgttcatatgctaacttctttacagggccacaagacttggtactaaattataggtctcaagacttagtccggcagagacaaatgatgccatttccagtttcgttggttattcaacctgcggcatcagttgttttttgtatggtgtatttctactccaggaaggggttagatgggttggcagccacgcagatttggagctgtacatatgatcaattcaagcgccaatcccagagatgctgccgtaaatcatttccctggtttcacagaactactggttcggtctcctcgcccaaattgggtggtactgtttttgatagaatagagatggttgtgctgtgactcgcaacagcccgaagccgagctatcttagctcttgttggtctagctagacatccaagtggtgataacacactgtctaggtactaagtacagtattgctcacatgtacggcagtggagagatatcttagttaactattcggcgaaggtcgaaatggatgactcattacttgcctcgcccaggccggctccaggcgtacaagttcattcaataatatctgctcaggacatatatggaacaaattgagtacagaaaaagctcgtagtggatgaggcaggacgtgctaaagacggttgtgggcatcgcaggattcaagcccggggctcaggcgccccctcggcccgcttccatgggctcacccccgggtgccccgggccgctttataattgattactcagctgtttcacagcccggccaattttatggtcttacttcctctggaccacaatatacaatggctttgcttgtgtgaacctgtatatccctagaagcaagagcatgcaccaatcatatatatatctcgatatagcctgtcaattgaggcaccgaagtacccgacccatgctcctataatgactgttctctttgagagcattgaatataacaatggaacacgagagcttcgcctattcagagagacccgctaagcgggttcgtcaagcctgtgagccctgcaggtaccaaacccctcagattgtttacaaagatagctgttaaccagtttcccaggcgtaagaaagctaaatgccccggagagcagccggtctgttctctgtgtgccaggctacggcaacaatgcctatacgccgatgaaaggcgtcggccacatcccgagttgagtccacgacccagtgattcagaccctcgaacatctcgggtcctggtgagtatttttatctctcaatgcaagcccgaagaaattttatgcaaatactgattccgtcataggaagatagattgcgaagccttgaaagcaaagtgggagaggttctagatgtacttgggtaagaacatacagaacctctatgtaagcaattacttactcttagaaacatgttgcagctcgaggagtgagccgcaaatacccacagaatctcttgtcccgtccgtgacattgtcaatgcgaagctcatcgattactctaccaccatgggaggagattattcccattgcggagctctatttgctatactgtgactctcagcctctacctcttttctacagggatagctttatttctactctaccaacacgcgaggcggagcttctttttgctatattggcactcgcctttcgcttctcgtacactcaccacagcagggccgattccactagcctgatcaatggctatgctgaagttgctcggggcctcgttatgaaaagagtctcagaagggccagtggagctttcgacacttcaatgtctttgtatcttgagcttggtcgactttacgagtatgaacctagcgtttccaacatttaaactcgagctaataatatctcccagacggcaatacacatcggtccagtatccacagcagcttagcgatgaatcttgcacaatgtgccaatatcggccaagagccccgttcgtcgaccagtaccatagttcgcgaagaacgcagacgctgcttctggagtatatgtcttctcaaacgactacacggcggcgacttcccaatcccagacataccccaatccggaggccctccatatccccaaagcccgacacgaccagcactcctctctccgggagcatcaaccgccgaaacacggcgaagtgacatgcaagacgagggaatcattgcatatgtggtaatgctgagcgaagtgttcgcacggacagcacggtacgtgcgacttcacgggcgtccaagcaacgtcccaccttggtctcctcattccgaatactccaaaattctcgctttacaaatggacctcgagactcgcatgccatatcttcataggttcaagccagccaacctcggggaacggtctctcgaggaattacagacacatcgtgaatactggggtccgtggtttctgaatcaattcatgtatcataccagcctatgtctactcaatcatccattgcttctctcgctcagtcttcggaacttccggagtaccatcccggagatcttcttgcagcacagctcagacttgatctcttcgcatacaacctggatcattcacttcatcaactgctttgaagaaaagtcatttctagtatcagatccattgctggggtacagtgccgccgttgtcgctacaatcgagctgcaactcagtttcacggatgatctgactatcagggaacataagcgtgagagattcgccaagtgtgtgaagtttgtgcaaaccatgggagaacggtggccgcacatggctcgactggtatggtcccatcttctggctctctcggtcaaaacaacaatctaataataccaaaaggcacatagattacagcgactagaagacgcagtatcagcaacctaccaatcagacccaggcgcgcaaaaccaaagcctcctgattgacctatctcgattctgggaaatcctcgaatactcatccaacagcgacacggactctgctcggcgtctatttggggattcactttatgtcggttcttcttccgcaggtggagaagtatctcagacatctcctttgcctccgccgttccgcttgagtgtccaggagcaagatacaccgaatattcggtctcagtcgttcggtaccaatactgcctttcctagtcaggactacccagcaagctctttggtctcgccgcagcacttgacgatgtctaatgatgagttctctattcttgccgccaatttcttttctcaggggcaagagttcctgcgcagtggtgataactgggagagtgttgggaatttctaagggcttggaacagcagacttcaaatcttgtgtgtctctacattttcttcgatcctgtgattgaatagctactagcccacggcatatcattcatggtgcattgcattatcatactcgacatttatccacatctcacaatattaattatcaactaggaagaggccaaagcgcccttgaattccttgacaaagttgaacacctcggagaaggtgttgtacaacggcactggcgccacacggacaacacccggctcccgcttgtcacagatgatacccgcattctgtaggcgttcggacaccttgtgcagcaagccaggcttgagcaaaacactcaattgagcacctcgagcattggggtctgacggagtgataatatcaaacagacgagtctgctcgtcggtatccttgagaagcaggaactccaaatacgccgtcagcttcactgacttttggcgtaaatcggccatggaggtctggtcaaagacggacaaagccgcacaaagacatgtcagatcaatgactgacgggttggacacctggaagcctccagctccgggaataggcttgaactctgctggtggtcagcatatgctagaatatgtatcgcgcgacacgagtaagaagaaactaactgttgtccatcttgaacctcaccgatcggtcaccaccataccatcctgtcaagcggtgacggaacttcggagcatctggtccagcgctgtaatcgacctggccatgtctctcgtgcacaaaaattccacccattgcgccgggcccggcattaccgtacttgtacgtgcaccaagccgcgaagtcaacgttccaatcgtgcagcttcagctccacatttccatatgcgtgcgccagatcccatccaacgacgaggttctttgattgggcgtacttggtgattgtggcgatgtcaaatagctgtccggtgtagtattggatgcccgggagaagcagcagcgctgcgctgtcggcatgttcatcgatataggacaggattttctccgtcgagatctcagattgaccctcgtctgggccaatgagaatcatgttctcctttgcatctaggtcatgccaagcaatgtgtgattcgatcgcatactataaacgtgttagcgatagattatcacctgcaaacatcattttcattgcaggttatcactcacatgatcactggggaatgctttccaatccatgagaatcttccgcttagtctcagtcggcttatagaagcttgcgagcaacaggtggaggttcgtagtcaacgttcccatggctgcgacctcttcaggcgcggccccgacaatgcgggacattgaagcagctgcctgttcagacagtagctgccattgtttcaatggtgagtcttcaagatcggtaaaatgtccacagacaccgatggacgaccaagtatccaactgagcctccatatacttcgatacggccttgggctggatacccaatgagttaccgcaaaagtacgtgcttgggtctgacgacagacctgcatgatcttgttaaactagatttcgcgtttccgcggggatatggttctcacctggctttgccagctttttcgtagcgagattcgccttggagggaatgatgaattggtcgcggaatccacgcagaggatccgccgcatccagagacgcggcataatcctgggatgctgcctctgcaggatagactggctttgataatttacccgtcatgttgcctataaatgctctcgtgaaatgcgtcgaatatggtaagttaagtcaagccgtgaagattttagttgcaaccaacaatgaggggaagagaagaataatgagtgcaggttggaaatggaattgctttttatacggcaagtaggggagcaccgaatcggagaccagggaccttcaaaggagctggcaatggtaaaccggacggtgttccgcttccgcctccccgatccgcctccctactgtttataagtggttggctacttccatggataacctatcgttacatcatggcttgacactcataacataaaatatatagatttctttctcctaggactatctgccatggattgtatgcattaacgcatgaatatttgcagatggcttgccatgcagaccacaacacgacctaggactctttgttagattggctatctcaagtatttcaatctggaccaatgtcgatctctaaaagtggtaacaggaaactaatttatgccgcaagtatgttgtacttttgaaattattcggtgttgaaccaacggagtcatactaagcctatctgtggatcacctcgcacagttataatatcccgtggagaggcggaacacggatatagatccgtatatcttccggattgtatagatcttttgactaaatggcccggtgcaagccgatgcagtaagatatttcaataatgagcccatataccactaagactattctcgcattataaacctaaaaggctgtcttttccctctgtctttccacgccagacgtgctcttcctcctgaacgaacactcctacacaatccattatccacaatgctgcaatcaaccgatactgttctcaatgacattttcgaaagctatgctgagcagggctttctctcggattgtcttccgctggccagacttgcaaacccctattacgaggcctgggaagatatagccagccaactcccgaacctcatccaaacaagccaaatccgcgagcacatcgataatatgcccgtctgcacaactgagcatctcaaaacggaaccagaatggcgacgtgcatgtgttattatgggatacctggcccatgcctatatctggggaggagaaacccccgaagacgtaagcactcaccaccgttcagacaaagatatccctaacatccagataacagagacttcctccttcaatctcaaggcccttccttgaaatatcagcacacctcgaacttcccgcctgcgccacatacgctagcctcacactgtggaacttcataccttcccacccagaagcagacatcacagacccggacaacctccacattcaaacctccttcaccggcacaaaagacgaggaatggttcatggtgatctccgtcgccgttgaagccaaaggcatcaagctcatctcgctgatgcgggacgctttcaaagcagttgctgccaacgacgtagacctactcactgccctcttgtacaggtttgccgatggcttatgcgacttgacattgactctgaaaaggatgtacgaacataataaaccggctgtcttcttccaccagcttcggccgttcttggctggaagtaagaatatgggtcacgctggtcttcccaggggtgtgtactatgatgttggtgatagtgatggggtggaaaggcctgagaattggctccagttgagtggtgggagtaacgcacagagctcactgatccaagcacttgatattttccttgggattaagcactctgcaacggatgggaagcaagcttgcggtcctagttttatccaggtaagagcatcacaagatcttagttttcagagtctctatcttgagacatatgcgaatcagtactaacaccaaagacagcaaatgcgagactacatgcctggtccgcataggcgcttccttgaagagctatctggtcgagctagtgttcgtccgttcatactggagtcgtcggttcaatcgcttcgggatgcatacaacgcagctgtgaatgagctcaaggctttccgcgatacacacattcagatggtcacacgatacattgtcatggcatcgagacagcctaatccggttcaacagggaaaaggcaaaatgaatctagccacggctagctctcaaatgaaggaagcaggcgcaaagactaagcttgctgggactggtggcaccgacttgatacccttcctgggaaagaccagagatacggttcaagacgctaagtgctaggtgttcatatggacgtgggatgattaaacgaacatttgtgatatagaattgtcttgcaatattgtaaattgagattggttgtttgccgctagtactatagttcaaaatgaccttcctaaataaagaatcatgtcccgaactatgtagcgttggatacgtcctgatatccgacatcaacgacgagaggactgtattcttgtggaatttcctcttttccaggtgaatagcaaatccccgagtcaaccttcccgcaaacttggtatgaatatggtttggatgggattcctagtgcattcctaggaccctaaagcatggtctgcaatgtcccacctcgtggatatcgagaaaagggccccatgtgagtgttaggaacaaagctgcgatgacgcaaatactccagcctcgtggtcatagccggcatataatgcgatagtggtgatgaatttggtgcaaacagacaggttgtatcgtgtggtcaagcgattatcaaaagcataaagacacgaacttcgactgttcagagcagtagacatactcaaagtctcagcacttaggaaatctggaccagggtgatgagaattgttggccaggcacattctgggtgcccaaaagccaaccacacggcgatggcctggatttttggcttaagagaaacgcgtaaagcaatcaccgcttcttcgtgttggcgggcacaccctcactctctcgcagctcggccagatacctctccctcttgatcaaccgctccttctcttccttgatcatctgctcaactgtctgagtggcctcggccatgcgatcaagctcctttctctcggtcatccgactgtatgggttcccgggcgcatcactcatcggaatgtccgccgttctctgcgcaacctgcttggtattcttccccttgctcttgccaagctgaccaccagcaaagcctccggtaagtatctcgtagaacggctcgacgggctcattgaaaatgatctcttcgtagttctggctgaccacagtctctcgacgctccttcattccctctgcatctgggccgtaagggtgtagcttcaggctatgccacagggtctggggcttctcatttgactcgggcacaaagtaaagcttgatctgaatttcgaattcaccccagccagtctcagaaacttcgaagggcggatgctcgatcgagcgcacattgtgggcatatgtctcatgtagcttgaattggactttctttagccagtaggagatgtcctcgccgttgattccctggacgaatatctcccacctgtgggtgtgatctggaggacagtctgggggcctgttatcgggatcgaaggggtgcgctatactgccaaatactgtgtttgttagtttgtgactgttggcgatcatgcgctttttgcggacataccaaatggtcggaacaccgagacaccctgcgagcgtgttagttaatttaattgtaatatttctagagattgaagcataccctgacgcgcttgtttcctgtcgcagacaccatcttgtaagttgtttgtggtagaaccagatgggcatggtttgtccagagcagcaagggcgcaagaaaggcacggaggaaggataatccgccggggctcaagcctgacaaggaggcgaacgataccgaacaccaactttagagtcctggtcaaggaacaattaccttgaattatttaactattttgcttattgaaaagcttcatattgacttcctttgctcacccctaaagtctcgattgcgagcctaaatagctaggaatattgttccaattctttagtgacatcattgtccagagctatcccaaaactacagcatgccgaacaaaagactagttgtcgccggaggaagcggttttttgggtatgtgatagccagcgcagagtatcaatatcatttcactaactagctattccaggttccagaatctgtaaagccgcagcagcaagaggatggacagttacatcgttaaggtagctttcccacctatttatgaatctacggaagagcacgatactgatagctgtccagtcgatctggtgagccccggtgggacacagtcaccgactctcaggaacggcccagctgggcaggctccgtggaatgggccaaggccgatatcctcaagccagagagctacaagccacatctgcatggtgcatctgctgttgttcactcaatgggcattctcttggaagcagactacaagggagttgtgcaagggagagtgccaattctcagtggccttcaacgagcttttagtacatctaagctcggaagccagaacactctgacaagacaagagggcgaggctttggaaccaaaggagaaagataggcagctgacctatgagctgatgaatcgagattcgggtacgtacaagagttccaaagtctgtttcaaaagctaacatgtgtgtgatttagcaattgcactagcccaagagtccgccaatgaacatgttccgaccttcgtttacatctctgcagccgccggggcaccggttctgcctgctaggtacatcagtactaaaagagaagcagaggcagctatcatatccactctcccggacctacgaagcgtcttcatacgcccgggcttcatgtacgactcgagtcggaagttcacgctgccaattgcaatgggtggctttgttgcctcggagttcaacacattcctcgggaacaggcttgggttcctcggagctatggccgaaaagcccctcaaagccgacgttgtaagcgaagcggtggtcgaggcattggaggacgagtccaccaagggtgcagtcggaacaaaacagatcgaggcacttgcaacaaaagcctggagaaagacgatgctttaagtctgttggctgatcaagtgacttatgtttgtaaacaatgtttctttttttggcagaggggaaaacgcgtggaatctctgctggttgattgatgtcttgtccaagtacagctgtatatcttggaacgtccactcatgtaaaatatcgcaatcaatctcacatttaacttaaatcatagtgccacgttcgaagctgtcccgaatttcggtggtgtactagagaactgttagcaaaagatcacacaaagacaaagcaaggggacactgaccttgttgtagaagcgagcgagtttctggttgaactgcctgttcttctcgttgatatatgtcacatccgcgtcatcatcaccaccacggcgctctttacgtttcttgaggcgcacttcctctgccttctggatatcgttgaccagtctgtcaacagcagcccgatctggtttgctctccgtaaagccagtggagtccgcagtggaatagaagctaccgttcttgtcgattgcaatcatttcaccgtcctcggtctccacgatctcgagatcgccattggccgcggctctctcgatcgcggcaagcttgtctttctcgtaggactccaagtttggcgccatttctctcaactgtctcttgtaaatcttccgggcatcttgagtgtagtcttggaaagccacgtcatctcggtgacgttgtttcttctccatgcgcctatcccacttctccgattcatccactgtccagtcccatgcacgcttgcgttcaaaatcatcgccttcagcttccgtgtccgctttaaggaggttgtgggaggcgaatgcatgcttgcgggacaatgtgtttagcagggccgggtcggtggtcaaacgctgagactcagctgcagtctcttttaagttgcgttccgttgcatttttctatatggtatgtcagttatgtaaggggttggtctggccaagtctattgatccgcgcaaatcatttttggaagccacttacagctcgagcctgcaaggctttgaaccgattcattctctcgcgcgctttagatgcagcgtcatcctttgtttcatctgttcgggtttcggccttgtcttctgaagttgcgacaggagattcgctcgtgttctcggtcggtggctcaatgaactgctcttggctcgcctcgtccttggcggatttatccgcatttctggttcgaaccatgatttccttgggttaatcaataggccaatagcagctatggacagagagcggtaattgttttgttggcagctaggttgataggaaatggaaggtggttgaagatgaaataaaagcgcgaatgcggtcaattgccgcctcccacaccgcccttgatctgctggcgaaaccccagacttccaccccttatcgggccgtgtttatcttctccacatcttctgggatcagctttactctagtcgtcatgggagggctacacaatcggttgttgctgctgcaagccaggcaacggcttaacactgggaattttctgtcacggcaattggtgcgcagtctctatcccgcaacgattaaacgaccacatgacccatcaccgtctgaaatgcttcgattcgctttaagagattccactgagccaatttatgactcgaatgttaacgaggtcttatctgaataccttcgtgggatttttatcaccgaatggaagttgaatactccgccttccccgttgtggacctccctcaaagggcctacatcgcggaaccaagagttgttgtggaattccaatagcgacatcgccgatgtctcttccttgcggagtctaattgagagatatgtcaacgacagacatggagcagagattttgcagactaataattgtttaccattacatcacgctttgcgacgctgccaacgtaacaacacattggcagaaatcctctcggtgctacgtgacttgtttgcaaggctgaagcgtctccagcttcccatccggcctggaatgtacactatagcgttatacttcgcatctcttgatctttcgccttctgatctcaggtatttcttggatggccaacaccacatgggcgctccagctctaagtcccaaggaaagtctgcggatagtccgatattgctctgaagcacttgactgcaaagtttttgaagacccatactatgaccccaatcccattcttgccgagattacaggcgaaggagaatctgtgaccgaaagtcgcaatttgcatgataccttattctggacgcaatctactgatcaaatcggcaaccgattcaattatgagaccaaagcccaggattatatctgtttacttactaggcttggtaatgatgaagtgcttcacagatgctggtctcatttcttgaagaacattcaacctaagaactatcaaagctgcatcgctgcctatcaggtagtgttggctctggtccaaaatattcagtccgaaacagcggtgaaatggttggaagatatctctcaacattgtggtgataacctgccattcattgcgaaattcccggacattcgattcctccttaatgaccttattataggcgaggcactacctgacctagtgaggggagaggactacctcgaactacttaagttttgtcttgaggacatggatcgaaggatgggtgttcaatggagccctgagagtcaaagtcatttcagtacggccttggacccaatctacggagcatttggtgatcagcctttacccaagactgataacaaatatgctggctatgatcatggcgggcaattgtatgcagagcttcgcgttcatggctgctccaggtctccggctgcactggccagggtcgtagatctgttgaatgaccacgatggacagtcgcagaatatcatcactcatcttgattacaatgcggcacggcttaatgaatttcggtccaaatttaaatctctggaactccgatgggtaccagaacactcaccgattgaattctctaactcccggattccggcgatacgtgatttctctaggcctatgaccccatctaccctaggccttattcgggctcgtttgatcattcatggagttcctcaaatggggatcgacaatttacatttgatgcaactcggctgcatggatatgcggtatggtccagaccaaccatggcagccatctggatatatcgtggtttgggaccgtcatcacagggaactcctcgggctgtatgttgggcagaacactggtgtcattagctgtggagcaccttcggatggccctcttggtgccttgatgcatctatcgctctcaaccaatcctgacgagcgaacattttatcctaggggcacgcgcactcattctcggaactgctggggtccttactatctggatgtagatccaagtgcagatctagagtattgagcgttttcctacagctctgtgagatatctatgaaatcatgaaatcatgaaaatgtcttttggacactgagatgactggatgttgttatgagtgagcggtgatgtgcttcggcagaattcaaatgtaccacaacgttgtagtcaccgggcatatccttttcggctactcttccatctccaatatcacttccatattctcaacaaacggaaactctacgatattctgcctcctccgactagaatccaacggagatcctacccatgtaccctataccctatgcctgatcggcctgcttccggcgtcctcggagagtgacatgcactgagattaattttccctgcattagagtcaagccacccaagccattttcaatatcaagtattgtccgtaaggatggggcacaccatcgaagtcttggatgtgcctggccacgaatggtaatttgtcggaatatctcttcctattctggcttacacttctcccctgcagcacacagtaaccgcagatcagcaacgctctcgaggcaattattgcagggaactataacagccagcgcagccacacttctacgtggcggtgcatactgaaaaaccttgacttgcatagtttctcagtcgcgctatatcataggacaattatcaaccaccaagtactgcagtggggtcattgtgatctgcgtctagcctaaagtcgacgcatgagaactgacctggaagctcacggggccttagttcctacacctgccaatgaagtttcaaacggtcacccttgacaactcctgcatttgcaggtcgaagaattccaatcccattattgggacagatcaattcttccaacattgcaaaatcttcacgaatagtccacagcattggcaacgcatatgatatatgtagccacaatttacggatccattatatttacaatagactgtatctagcgcctgggcccagttgagtccgactacccttagttcgttcgcctcaaattgcagctgcctcgccgatcgatctgacagcaaacgatcattgccccatccccaattggaacaggtgtcaaagtccgcccgaagacccataattttgggggggtgcaatggtaagtgcattgtcctggaatgttaattgaccttgaattccaggaaaggtatctcgtgaacttgctagtttatatgcgtctgtgtttcctccgaaagggcttactgcttaccactgtcgaaagtatactccgggactgcatcatataccaggatcagcccgccatcacggtaagtcccagtgaacacagcttccagattccctgttgtggggggaggggcagatctttttttctgaaggattgccaagcaacggttgaacgccaatcaccgcgcctcacggcagcttcccagctccagccacttgggatttgaaaaccgggtcgataccagctggctgctccgaaggcttgtcggtcagcatccggcaaacctgctgttctgtactctataaagcggagatctgagttttctgctccaaagcccattacaccgggggtactgtttatcattttcgacggactaagacacgatagtccgccctatggtccaattcgtggcccactgcggagtactactccgtaaaccggttcgcaaaaaggcatcattccacgacaaggactttgtcactttgcctcgttttttcgaccccattagcaatatcctgataggtcaaaactgacaacccgtatgccgacacgagatacttcagcgcaccccggttcccagggaaagctttccagctgtacacgcgagttccacaatgcagaacagcttccactcatattcgattgcctgaccgtctttcaagagatcaaagaccccgagtcggggaccattttttctgccaggaacagtgccagtccatttagttcatatagctcctccacgcaccatttcccatggaggcacagcccacacctatgtccgcagcagacgtcttagtactggtttccccttcttgtggcaaaacccgctcggcccgttcccccggctcttccctttctcatcatcggtggatacggcgccaatcgtagagcatcagtcgaggatgtgtttctactagaacaagaagaagtatactgttgatgccatttgctattcgccctcggtccctgtcatattccagccctcgggtgattggacagctcgggaaacccggacaggggtgtttaaattttgcgctgtgcgtggacgttttttttcggtccctgaggaaacccggtggccaacgaataccccctagggaagtatagatccaatctcacagggccagcgaagaaaaggatcatacccaagtcgtgtcatgaggcattgctgttaaccggctgcattcacatgccgattatcagatgctttcattgaccgaatatgtttatctttcccatccaacctatataattatatctgggacattggctctgttctggtcgtgattatctgatcgctttgtgcgttatattcaatgcctcatctgaaaccaacccgaatacggcaatatctaaactataacacaaggaccaactgtcggcacttgcgcaaatctccgatagatgtcgaggccaccgccacagcaatgtgggaattccacatcggagcggccatacatcgaatcggtcccccgcactcaacaccgcggcccgataccaatgccctatccataccgacatgaacctcgacagaccataccccagagcacgagctatgagcaccctatgcacggggcgccccttggcccaaggcttcctgccttgattgttcccgaaagaaacgcagatccacgatatatgctctcgtccgacattgcctacctgaatacacaacatatgtcccaaacgctccctctgcgatcccatcaccaacctcctggaagctctgatgcccgtggttactacaacccatacgaagagagaacgtacccaagttcgagccatgcccgtgactatgatagtcaccggagctggacatacgacgtggagtcccagtaaagtccctctcttttcgtttctgtcgattaaaccacctctatctgtcagtcatccgtcctgatgcgatgtctttggcttgagaattttgaacaaaatcctcctctcacgtcacatctgtgacaggttacacaaggcagggagacattcgatcaagggccacattctaaccgcgaaattcatatagacacagcaacagttccacggccatgcccagccccgtctggtcagacaaaagtgcagctacgcacgcattcaatcctatactagccagtacccaccaaggtccgaaaccacaatcccgaaacgcgaactacagaatgccacatggcttcgacaagctcctccaccatgacccagagccgcaatcaccatcacctcctccacgacccagacgaccatccaccgaatccagataccatctccacatccggcaacagcccatcgccgcacgagcctgtggcgcaggcgacagagaccgccgccccgtcgacccacctccaatcgtgcagatcctccttaccgacttcgactcgaactcccaggaagaccgggatctcctccaagacccccgcttcacagtgggctgtctactattccccgtctcaccctctttaccatgggccgagccaacagaaacacatccgcgcgagcgcgaccagaatcgagatcaagatcgaaatcgcgatagagaacgagaacgagaacgagaaagagaaacggacggcgttgcccgtacagacgacaacttctcaaccccattactgtccggcaaagccttcatgtcccctttctacgtcgacgccgacccagaccccaactccgcacccgcacatccatcctccataaccgatgcccatctagacaacccccctcaccacgcctacaacaatgccgcctcgcgcctccaccaaccagctacctttttcatctttgcggatctctcgatccgctcggcggggccccttaaggccccgtttnnnnnnnnnnnnnnnnnnnnnnnnnnnnnnnnnnnnnnnnnnnnnnnnnnnnnnnnnnnnnnnnnnnnnnnnnnnnnnnnnnnnnnnnnnnnnnnnnnnnnnnnnnnnnnnnnnnnnnnnnnnnnnnnnnnnnnnnngcggtcggcgggcctctataggctccagttccgattgatgaattggggctctgttgaggatacggggcagtcgatgccgattcttgcggaggcgtggtctgatccgttccgtgtgtatcctgcaaaggattttccggggatgagggattcgtcgattcttgccgaggggttgaaagagcttgggtttgtagagttgaagacgagggggcatgggaagggaaaggggaaaaagaggcggtgattggttcttttctcttctcctgttgtgttgacattatcatccttcgaatatcttgattgttggtttggagtctgaatggctttgtctcgggtttggcacgaggaaaggaaatttgattcgaggatgaaacagggattgcgttcgattatttccttcgaacatgacgacagttctggtatcttactggcattttggtttctctttctgtcgtttcagcttgggatacgggctatatagaagaacagatatcaaccaaaggcccaaaaagaaacataaagaaacattgctatgatacatggtggaatacaggccaaaaaaatttacagcagagatataagtacaacagctctaaaccacctacgcaagcttcaacagcttaggaggcagaccagggttgaatgtccggtcttcccacttatccttcatctccgccaggcttttcttcgacaacgaggccggaagaccctttcgagcagcaagcttgtacatctcacggctcttctccatctcgccatcctcgcgaaggagcaaggccaggatatacccagcctcgttgttccctccatcaaaagcaagctcgtaccaatccatcgcgagcttgcggtatgtcttatgatccttgggttggttgaaaaacgtaacaaccccactcgctatagactcaaagggtttcaaccaggcgctgcgcgcagcattagcatcttccctctcttttgccttcctctctgcttcggtggtaaattggccttgggaggtgaggtaataaaaattagcaatgtaaaagctggctgcaatatttccccacattgcagcgccacccatgaacgcctcgtacgtctcgtacttgttgggggcctccgtttccaacacggagatggcgaaatcagccatggcgatcgggtcgtgaaactccgtggcggctcgcgcagtggccttcaggatacccgctagaccctgttccttttcaatagccacagcgtacatccgccagggcgattcaaatgcgcccgctaacgttatatcctcccacaaggaagggcgtttgctagagggttgcagatatggcagaatctttcgctctagaagctgggcggcttctgcgttctcaccgcgccagatgagcagtttggcatatagcataatcgcatgagggaattcgtctttaagagccaagtctttgacctgcgctatgccctcagtgtttcggtaaatgtccacacctggcgtgctgatataccggttcacgaggtgaacaatggctcggcgcgaatgtgcttttgcgcagccggtcaacgcccattggtagacgtggtggcctttttgaagatctgcaagaaggatcgagattcgataaatggcgtcgacatctataacaaagtgcataatcagtacagaaccatttaatccgtagcgtttcactgtataccaattgaagtctgaactcacctattgagatactccgaacaagactggcggtagggacctgcgagtgcgatagcctgatcaactgttcacccacggacacgaacgtcgccaagttgacgcccggcggtatgttactttcataagcttcatacattttgcgtgcaaattgcctgaactcagccaacgttggttcaacgtgcgcagtagagtgtctattccaaaacccatcacggtctattctaaatccatcttcggtgaccaacacatgctcgggtatcgcattctgtcttcgaacagatggtgctcggcgagaaggcctgacagctgatcgattttgagtggtgtggaagggtcgtttcgatgtagttgtgttgctattggtgacagctcgagtggtgcaaacttgcgcgccgtggtgacgcaagacatgggcttttggagagagaacttgatgtaatcgacaccattgtaacggcaaaatcaatggtctggccatgaaaacgagtgagggaaatcgtgggggtggtagggtgaggggaggttttctctgaagttttggagttcgggaacttcaccaaactgctccgacatttagatctaccaacctgacgatacgccagagtagtatttaaagatatttactgattttaaagataatagaatagcattgatatgctaaatgcatcaattaaccaaacaaaccctctgtaccagacggtctcagaacacaatgcgtataatgtacattttgccttgatctgccaggccaaacacaataaatgctcaacaagatctctcaaaagcaagaatttaaagagataaagagagaggaaaagaccaaagcaacaacatcctccccgactctcttcccaatctatccgctccccgtgcctaaataataacacagcttctactccatagtcgccttggctccgatcgccttgaacgtcgcaatgagcttctccgcctcctccttgggcacagactccttcagaatctttggtgcagactcgacgaacttcttgctgtccaccagcgacaggccaagcatggtcttaatctccttgatgaccttaggcttggaggtaggctcgaaggactcgagcttcaggttgaacagcgtcttctcggcagcggcgggagcagcctcctcctcctcaacagcagcagcggccgcaccgggggcaccaccagcggccatagcgaagccgccaacgggaaggtcggggatgttcaggcgagtctgtgcaaacattttgattagcaatagttcggacatttatgtcaattgagtaaaaggatgatgtagatagagaggtatgcacggtccgcatatcctgcttagaaacccatcgattatgtgtagtttgtcgaacgcaccttcaagctagacaccaggtcggcagtctcgagcagcgtcaatgtgctgatctggtcgacaatctgggagatcttggggttggtagcagcagcaggggctgcctgggtggattcgcatcgtcggctgctgggtgtgcgacgggctgtgaggtatgtagcggaggccccgatgcgcagggaggacgggcggacggagccggagagctgtctagcacagcgggctgcgacctgggtggagaaggacatggcggaggtgagaaagaggcgggaagctcgagagaaaggaaaattagacgaaagtggtggggattggaatcgcggctcgtcgataccaagaccgaaaggaaacactcgaggaaaatctgggagtggcacgtgatgtatagtgcctcaggcatcattgtctatctagcaggcaaacagggccgaagcaccaaacgtatgatcactcacgatattcttgtatgagttctttcattataagatatctttgtagtaatatagaaggagagcagagcaaagaaaaaaatactagaagagaaacgtagtccaatttacaatggttctcgaaaagcgtatcatcgtacgaagatctataggcctcatattatcaaacagcatccagaccctcatcgctcctttttttttaaattagtcctggtcccaatcacctccaccctgcggtggcttggggcctcctgcctgtctcgagacaatgatctggtcgacgctcagcaccgtccgggcagcctcactggccaaacgaatcgcagacatcttcgtggccataaggtctagaataccctcctcgacagtgtccagggtgccgtcagattcgccaatctcaaggtccacaccggtagtccagtgtggttcctcctcttcagacgagctgccctccccctcatcctcggaagatgattcgccaggggcagtggcgcggtggtgcgcagtgtacagacgcgagagaacttcggtggcatctagaccggcagactcggcgagtgtgcggggaatgacctcgaaggcctcggcgaacttgcggatggcgtactggggcaaaccaggggttcggtcggcgaagttggaaatgcgctcgacgagctggatctccgtagcaccggcaccgggcacgagacgggggtccttggtgatggccttgacgacgttgacgccgtcgtcgatggcacgctcgacatcctccaggtggttctgggtggcaccacgtaggacaatggttgctgtacgggtaatagcgttaacatcctcctgacggaagacagtcactcgatcaccgccaatctcggtcgtctctacaacgtcgatatggcccatctcatcgggcatgggggcacccaggcgagccagaggtgtggcaccgacaacgcggcacaagcggcggagctcgaacttggacagaatcttaatgacgaggatattgaaacggttgaggtagtgcatggccaagtcgccaacagtggagccagcaacgaccacacggaggccggaatcgtagagctccttgatggcaatctccagacgatcctcctcgcccgcggtgaagtccatcatctccttggcattcttcaggagaactgtgcccttggtctcggtctggctgatatcgatggggcagctgaaaacgccgaccttggccttgctggccttcttgatggttccatcgggctcccgggggaagaccatacccttcaccactttcgactgttccaagctaccacccatgatcttaacaactcgcacgttgtcgacgttgaagttgacggggttcttgggcagcacagccagaaccgcctccgcaaccaacgcagccaacacgtcctccgtaccagactgcttagcagccaccactgtgcggagagccttgctcaactctgttgccgatcgcatatcctggagtctgtcgacctcgagctctagatggaatcagaaacggttccctcatttgtatatcgacaaaccaatcatgggggggagggggcaaaacataccctctagaaccgacaaggcaaagatctgagccttctcgtatccggaaacaatatcactcgtcttgagacccatacggatcaactcctctgccttctttaacaattcaccggccaacacgataaccaagttggtaccatcgcccatctccgcatcctgctgctgactcgccataacaagcagcttagcagcgggatgaacaacatccagctcacgaagaattgtagccgcatcggaggtcagaatcatcttttgcaggtggttaatgacgatcttgttgcgaccataggggcccagggaggtctggacggttcctgagatagcctggcaggcttcgatgttacggataacggcaccatcttcagaatcgtggctgtatagcagaaaatacagatcagtcaattgctttgcttctttttggaggggcgccagataaggaggtccctattgcggtgggttttcgggcttcccgacttttcgaactcacctctggtacccggccttgaagagccccgcctgggagggacctggaattgatagtgacatgatattaggtcgcgtccggttgagatgcgactggatatcaaatgggttggatgtgagagagttggagctgttgtgccgggcaatttttggagctgcggtggtgggtttgcttggtttgcacgagggggagttgcccagggcttggcgctcagtatagatcagcttacgagcctaatccttcaagttttatatgtttttgctgtatattttatgaggtgtgttatggagatgctctcatgtttattaatacatcgcttaatggtattatacagttaccatcgctctattgatcatctcaaatatgagacatgcgaattataagcagtgtggaaaccaggcactagaaatgttagcagcttagtagatggaacgaagaaaggaaaccttactgtatcctttgatagagttgcatccattctcctcgtagattatgttggccttgtcgagcctatttagtcgaattagtaacaaatagggcaacgcagaggaaacggtcataccatccttgaatagcttccattcggttgtaactctactataagttagtaataaccccttcaaacaattcttcaaacctaccgatgggtgagtggacatgaattgtggaggagcctgtttctcctgttcatacatgcgagcccatctagcaagtatcagcagagcccaagacgatggcccattctatcatattgacttacagtttaacggcagcctcggggttgaaacaggctctggccatcatcactgacaacaatcattagccacataatcgtaagttgatccttaacttcaagggctcatacttagcccgatattgtctgcctcggcctgtagatagaaattagccaagtgaccgtatagcaaaaaaacagacaaaaaaaaaacaatacctcttgcgtccgtgagttcggcaagctatacatgagattcaaaagaaaagaagaaaactgcccggagacatcgaacaagaaagagatagcgaagacagctcctagggtaatgaaactgttgctcacacgctcagccggatgatgagccacaacatgagcaatctcatgtcccagaacagcagccaagccatcctcgtctttgcaaatgggcaagatacctgtgtagacgaataccttccccctaagcgaagcaaaacaacgtcagcgatgtccaccatagaatccaaccatcaacaccacaaacccaacagaacctacccagggagcacaaaagcattaaccattccatcatccttgataacatgaaccttccaatcagcgccctcaatattcacctgcggaatcaaccgctgcagcacgccgtcaaccatacgagtaagaggatggttgtggggcaggatcttcccacgctcggaactgagtacctcgcggtagctctcttcacccatatttagctcctggtgacgagagacacaattgaaccgtcgtcggccggtcatctccactatctccgtgttgtatagataaagtccggatatccccacgccaatcgcaacaaagtggtgcggctttgcattctgcactaagcggaagacgaggggttggtgggtgctgcctcgaaatcggttgtattggttgcgtctttgttggtagggggatttatggcttgaggagaaggtacgccggttgcttgggcaaggtgtgggaaatgagagctgtgatcgcggtcggggttgtcgtagcagagagggagcccaacaaatagacagctgaggccctggggtattgtatgagcgtgacgtttgagctgctagtgaggcggccttgagcttggtggagggcttcggcgataagaaagggtatgcgcatgcgctgcgaaaagcacgcgccatagattgacggagcatggtcgagaacctgtctacctctctatgcaaatgccgagaaggagagaattcaagaacttgcaatgacctaggtaaaccagaccttccccggggaagttgcatgaaggttgaactgagcaacacggcgataagcagccactctccccgttttcgtgacatcggggagcaacgtcatgtctccagaatccccactctactatgaggatatcctagtttcttcttcaaatttagtcttgacatagtttaccgttcctctcagtacatacatagacaggcctacgagttgattcacctaagaaagaacagtttcgatgaggtgggtatgtactaatccaaggcaactcatagattcagtctagcaaggctggatgtatagaaaaagaaaatcaagtccggtaaatcgtcatatgttcaaacaagttaaaaaaccgacagaaccccatcccacccgcgcaccatagccgagaccgtcagcaattacatagaaacagagatgttatgtccaaatacagcggaaacacatcaagaacaaagcccctggtatcatgttgggtagtcatgggaacaaagtggtatcatagggatggcaaaagaaatcgcaaagggggaagaaaaaggggaaataacacgtcgactcggtatgtaaaagtcaataatgtaagacaaaggaaagcgtttcaaaaaaaaaaaaagtcaacacgaagaaaaaaacgtaaggttatagagagttaactccctactcctccgtcaaagcatcgtcgccagtctcgcgccagtcttgggatcgctccgtcaaccgacgcacaccggagacacgctgggcccagtgggcttcggatggagtgcggaaggtgtaggcgcgctgcgaggagatcacaccaatgctttgtagcactgctttgcgtgaatcacgcccgaagactgccgggtggttgatccactccatggacgattccagatctgcgttcagggcaatcatcgtctgagtatcgaccgcggagggtggtgtgatagtgttggtgtcggatgcggatgaatgggttccactaaaggtagatgatttaggagaggaggccaagactggggtgtcaccacggctgtcggcatcgctgtcggaccgggaagcacccgggggcagcggtggtaggccacccttgcccaggcccttgagaatgctgcgcgtttcgctgagaaggtgcatcgcgcgatcattctggccccgagataccagagtgagagcacgggtcagcatgtcggatgttagaagctccatacggcgctgcacaatcgaggggtggggaggaattggtggcgtaggggatcgatggcccttggcccgaggattaggaggcagcatagtaatggccaggagtgaaggtcgaggggagtgcgtgagatggccatcacggaggaggtcgccgtaggttaaatcagcctggatcaatggaacctcttcaacgctcatgactcggctatcatcgccatcagaaccgccgccgagagcctccaatccggagactaggctctcccacggatcctgcggcatgctgtcctgcgtggcattgtcaggctggatgacaagttgaaccaagacgtcgcgtttgtcaccgaatcggagatcacccagtgcagcttctgcatctttaccagttgcacgctttgtggtgtgaagagcgccgctaatcttaacaaacttggcgggtgatccttcaggtaggcggagcttcaacttgacgttttggtgggaggttgtctgcaacgcgcccaggcatccagcaacacattctcgcaacatcatccaatcctttacatacaagtaagatcccttagtacgagtagacaactcaatcatggtatcaggcttatgggtcaatccaagtccgaacgagtggatgttgaccttagcagcttccgcgcgggagaccacgaaatcaacgctttcggggtcggaaatagaagagtcgctgatcaaaaggatggttgagatggggttgttgaatttgcgctgcatcagaagatccatggcgacattggcaccttcaaccacgtctgcacggagacttttttgaccaaccggccgaatcgattcgaggatcttcgaccatccagcccagggcttggtggtcataccaaccaggggcacacctccaccactcgagccaaaagtcacgaggcccatccggtcccgagggccgagattctgcacgaggaatttgagggcatcacgcaggagagtaatcttcaagccttgcatagatgaggataccggaattaccacgacaagatcgaggggaatatgaatagtgttgattgcagggaattctgattcggggttggtgtagtctgtaatggcggtattgatggattttgctgcgccgtaagacgaattgatagaagcctgtcgttgaattccacggttaccacggtagtcatcgtcctccgcccccgagttatcatagtcatagtcattttggcgtgaattggcttctgggtgcaaatcgatcaaagaccgacgccacgtcttcagctcgttgcgattcttgaagcgaaggtagaaacagggcagctcggtgacggaaaggttcaaggagagaacaggttcatctggggacacctcgatggactttaaatgcttcttaatcaaaattgagcccttgagactgcaacgaacaggcttgcgtcgtccggtcgcatcgaattgggggtcagatgattttttctccttcacacagataagcatctctttgaaaagatagcattctaactcctgccaggaatctcgatccttgcccacgcgcatgtgtccgtggaggcgcagcttgccgaaccggttgaattcaagaccgtgccaattgtccacgcggctgcgcaattcctcagccacttcttccatattctctgttggctcatactggattgatcgagcatcctgtccaccacctgatcgtcccgcgtagaccccatccggctgcgattgccccgaaggcgtgtgtcgtaggtcatctaagtccggacgccaattggcatctggcacttcgaccgtaatcagacacgtgagggtctgctgttggcgggatctgttcaaagtcgggaactcgcttcggacggtgactatcggcgcgggaatgggattcttggcgaccttagggcgaggactgaggtctgactccatagcctgtacatcataatcatggcgccgtccagtgctggtgtgctggccttcattgtattcgcccgatgagccggccgcgctaccattccgggagtggggttgacgaggattagaggccacagtcaatcgatctacgcgctcacgctggctgctggtatcacggctatctcgccgactatatgatgaatctctcgatgggttgtaggattgttcttttggtgaggggtgataagatggctccctcgttgaagggttgtagggtggctccctcgctgaagggttgtaagatgactccctcattgaaggtggctccctcgttgagggattgtaaggtggctctcgggtacccgacgtgtaacgactgccggtatcacttggtcgtcgacccaactgttgctcccatggagttggtgttgtcaagccactgcgtactgtagcggtatcattcgatgtcactgagcggacaatattactgattttctctggggacaatcacattagccttctgagcccctctcaaccccgcgcgagggacgtaccgatatccaagacatttccaccgcgacttgtgtccaaggccaatggcgcattgcaggttgggcagtattgaccatcgcattcccgcagaaattcatagaaacaggcctcgtgggagacatgggagcacgagagctgcaaaacacgctcgccgcgtagggtatgctccaagggttcctcgcagacggcgcattcgctcccgacaaaggtccggtccctccgtgtgtgggtgcgatctacctccattgggccggtggtccgtcccgaccttgaatgaaatgatgcccgagagcgattggaatgcgcagattgaccagcgagttccgggtaagcagaattgatctgtccggcgacagtcgaggttgctcttgaccgggtaagatcggcctggttggaaagactgctgctaggtcggtctatcacgcctcgagtgaacgaacgaaatgaacggagaggtgaacgagaggatgattctggctgcaattgaaattctatacgtcaccggtatccggttagcaagttgggacctttcaaggctaatagcagattgaggtcgaagctcaaggattgaagatgtggatagaagagagaataaaaaggcgcaaaccacactcaggggagagtggttcagtccgacctgtcccatgaggcatctagaaccggccacaatagtctcagatctaggacatttggccctagactgagatactggaagagagacacagaacacttacttttgggctttttggatcgacctaggagacccagctcagttagatgttgttgagttgagtcggtcccagagttgtcctccgatctaagtgaacgtttccacatcgactctcaaaggaaacaaagaggtgggggggaaaagaaggaaaaaaaaaaaaaaacaaagcaaaaggagatcgaaaagtaatcaaaaaaggataataaataaaaaaacaattaaagccaaatacaataaaaattaaatccaggcatttcaagaggtaatagtggtacttcgtatacaaagatgaagaaagatggagctgaacaggggggtacacggagtatacacaacacgttttagagtggacacatggttaactgaaagactaaaacagaaagagaaaaaaagaaaaaacaaaaaaacaaaaaagaaaccatggaattggtcaagatcttgggtaggacaatagtcccaccctcaaccatgggtttggaggtggagatcccctgaattaattgaatattttacagtagttggcgctactgcaccccttattatccgccttatacatagtgaacgagtgatatctcttcttattccatcttgcattccacggctccgtgcagagggtgaggtggtaactagtcaatgggtcctcctactccgtaccttggtccttcaatgcaattgtggtcctctcggggtgacatcggatatccgatcggctttacaatccgcttacaacataggggatctgatcctggaatcgggtttatttaatttactatggagcacaaatggagtagtacctggattatattactataactattatttattaacctttggactgattaacctcttcttctgcatcttatgttcttatgctataccttgactctaaatctggcctctgtctgggttcatcttttccatggactctagatacccaaatatttggcagatccaccaacctcggggaattactccagacgttccaaaagaacatttgacatctggatccgtgagtggtgataacaaggttggctagtggatttacttcggatcggattaacttggcatacgcgggactaagtaccaatcagtcacgtgatcgaaagtggctcatatatccgctagtcgtatacccactcaatattggctaaggaccacgcgcctggaacatcggacagtggcaagtttctctgtcgatccaacggcttcccccctgtcaaaaggtttggctctgaagaattatggaaaccggagatttatttttttgtcaggcaaagtcattctgcaatgacgcaatctctcttcaacttcaacccttccagggtttaccccagctccaagctctccctgctgtcggtgatcgacatctggatcatcaacaaaattggtcgggtccggatgtcgtgaacgcagtggcgtctagacgcacctccggagctttgacgatcactccttcaacggactccaacggaaagtttatgtcatgagcaacatgacggagtggttatgacaatctccctagctcctaccacaactgggtcaacgaaaaagcccttggcccaattggtctggctcatcttcgctttcactcctgagctccctcgtcacgtctgcattggactccggcgggtctatcctgttcgtcacgctcattagcgcttagccatctgtgctaggaataggagaggcgaagctagaagaaattggcttgcacatcattgactgtagctcccccgtttatggatcataccggctgccggggtgggtacgcatgttgtctacgcggtgatcgacatactcctgtctttttggatactgcagagcgtctgtgcttactttagctacttctccactgtctcagaaaagccgtctagacacaacactgactactccgtacggagcagtagatgacgattggcaacgcctcccccttttgaggtggaggtttgctattgtatctattgcgaactatgcatgtaggcacgccccttgtgctggtctgcacgtcatcctgcgtcggagaattgtcatgcaggataatcgagactgcaacggaaagtggagttgactggtaacaactcctcactgctcgtccctgagctgtcacttagcatacatatccggctattttctgcattcttacaataatgatccatatcacgatccacatatatgtactttgtacacgaagcgcatagatcactcaacgatcatgaccgttgaggttttcagagcggagacaatgtaaacacagtctaactccttttagcaggttgatcttttctctcctcccaattctgaggtacctatgaaacactggtttcagagtacgagctggtcgcttccttagtgcgttacaagttggaagtggctcaagtggcttgatcccgatgatacagggctgcgatatggcacgctcctagtttgtgcatcgtaagttttgaaaggcgactccctggtctttgaatagttgtatgcagttgagttatttttacgtgcaggtatatgcaagtggatgcatgtacatgcaggtctcattggccgggccgatcccgagacctgatgatctctagcgcataaaagactcaagaccttgaggttttggtcaactttggtaaatgcagacttgcagctccaacgtagcaacgaagatatagatcctttcgggttggctaactcaaagccgacttctatcaaacgtgtgatagacccgatctatagtctactgtacctgaaacagatcgtctatgcaagtgaacgcttcaaatccatgaagggctcctgaacacactcgttctcacacatatcgactcacacaaagtacataacgaggtatctcatggtcctacgcgaggatgtcttggatcctatcagcccgggccactaggattgtctcagttgaatcaacccattatcttatttgcaagacttagcatggccattcgaataaattgtaatataagttaatataatttatatataaacttgagccaatgcgcgaactgatggggacgtagcgtcattcgtcagtccaaccccatacaacttaacgacgtctagcgtttttttttttttggatctatcgctttcgtacttttgcagcaaggtaattttggacatgtctatcgtttactctgtactatttgtgttgatgtttctgacacgtatcttcttagtattagtcaagataatatgacatgtctgttcttgtctttgttcaacggctttaatcgtgcctctgtgatgtgtcgagttcatacttgaaacagtctatacaatgtttggcgtaacaacgctcacgcttgatgcatgggtgtcgtctgattggtacggcagaattgtgttatgtagcccaaagctcctaatcaactctgacttatactagtatggtcagtatagatagattcgaagttcagaataatcggcttgggtggtttcatgatctaacatagagaatgtgacatcaaacaaggtgcaaatcattgttcaactaatgcactggctagttcattggtttttctcatacgacgagctttttcaatcttgaatttgtcggaaacggcatgcttgagcaattgcttcaagaggattctctttatgactatccatggatggaatcaatttcggctttgggtgagtacatgtaggataaacacgatccatggccacactatagaatgcctgaaataatcatttacaggaagtaagagatatgaatgtattgtttcatttgataaagacaagcaaagatcaacccttgcccgagaagtgtaagtgcactttctcaaagctttggcgaagatacatcaggtgctccaaacctcggacaaagaatttgggcatagaataacatgtctaaacccatggagagagaacgtccgccagatctcctcatatctccatgaataagagcccaattcctcggttcatttccctgcatcaaagcatccacagaattctctctcgcagctctgactcgggtcggccggtcatttgcatcatcaggccaatcgactcctccactccgatcctgactgtgcggacttcttcgactctgaccacataacgcagtccatcatcaataacaaactcatcttccagtctgatcaagccttggtagtgagcgctgactctgtgggcgtcgagatcatagaatgcgcaattgttgttaactgaaatcgtgccgtacacgcgaatagttactttgacatccgggaagcctttgaagatattggcaaaggttggtccgtcactggtgatggagtcccagtggttcaagacaaacatgatgtcgaggccgtaggttcggccatacacgagtatgtcggtcaaggactcgaacgagtcactatcaggctgcagaggggtgatcgatttatgaatcaatgggcagtagcagtaggaacggccttccagcttcccatacttgcgcacatactctgcctggagctcaatcagggcggggcgaaggtagtacttcagttggtcagggtcgatacgtgcggcagggggagcgccacgagcaacgaacacaatcaggggctctgcagtagtgatgggggggccgatgggaggaccggtcacaaattctatggcagcgggttccgccatatcgagatcagtgttacttgatggtttgttagatttttgaccttagatagaggtatggtacaataataccttagtcacaccggttcagaagctgatgcagagaaaggaaggacaatgagggggaaagcagcatcttaaacagtaaggctcggcgttcattgctcaacatgcgatgcgtgaacaaactgtactgctatgtggagggtgaataactgaagtcaataaagccaatagagcatcctcttggggtcttattgagctaaggatatagattctgaaaggctcaaaaggattagggagaaggctattttgccttttgagcctgtcaatggttattcctctcaatagtcccgaggttgacatcaattgccttttgatattcatttgggagtcttgtcatagtaaaagcatacatatctcggaatgtagtatatgcgagtctgttcttgtgactgctactgtaattatttatcaggttaggttcatgttgttaatagctcagtcactgatatatcacagccttgtatatattctgctttacaagactatacattgtttgtgaagcttgttaaagacagaatacttcacctataggtattgaagaagtaactagtcctctagaaaagcttgaatttgatattcctatcaccgaagggttgaagttgcgatgttatatagagatgcaccgcaccgtggagatatcggagatcaaaccccgaatagagtccctagaggcagaaatgccagttgttagtcgggaaaattcatcgaatacccccagagacgttgccaaatacaagaagacctcaaatatcacagtattcatgttcagagagcgaagtactttcaagcatcggacccggcctgacttcgctcaccgggcggccccgatctggaagctgactaagacggcaaaagtgaagagagttgttgggaaaaaggtgcatcaccttcaacataccatctccaattcctttacaaaatgctcttccgtgccgcggtccgtcaagctgcgcctttgaggcgtcatgccttcactcctcttgcccgtcgcactgttaccaccgacgcagcttcagctaacgtcgagagcccactgcctgatgtatgttagccctatccggaaaactgaaactgctcaatctttgtagggtttccattgctaatgcttgcgctataacaggaggatcacaagctgttcactgtccgtctctccgatgagagcttcgagacttatgagctcgacccacccccgtacactctcgagacctccaagaaggagctcaagcagatgtactacgacatggtcgcgatgaggtacgataagcatggcatgggatctttgatgtttgagctagccgctgactgactgtgtgttcttttgcagacgtatggagatggccgccgatcgtctgtacaaggagaagaagatccgcggtttctgccatctgtcggtcggacaggaagctgtcgctgtcggaattgagcacgccatcactcgcaaggacaagattattaccgcttaccgctgccacggtttcgccatgatgcgtggtggtaccgtcaagtccatcattggtgagcttctcggccgccgtgagggtatcgcgtacggcaagggtggttctatgcacatgttcgccgagaacttctacggtggtaacggtatcgtcggtgcccaggtgcccgtcggcgccggtctggccttcgctcagcagtacaatgaggagcccaacacctccatcgtcctctacggtgatggtgcctctaaccagggtcaggtcttcgaggccttcaacatggccaagctgtggaaccttcccgttctcttcggctgtgagagtaagtcgtttcttccaagtcttaatagcatcaaaaaagtccgcagatgtactgacgctatgttcttctagacaacaagtacggcatgggtacctccgccgcacgctcctccgctctgaccgagtactataagcgtggccagtacattcccggtctgaaggtcaacggcatggacgtcctagccaccaaggccgccgtccagtacagcaagaactacgccatcaccggcaacggacccctcgtcctagagtacgtcacctaccgttatggtggccactccatgtccgaccccggtaccacctaccgcagccgtgaggagattcagcgcatgcgcagcaccaacgatcctatcgctggccttaagcagaagatgctcgagtggggcgtcgtctccgaggaggagctcaagggtctcgacaagaccgcccgtgccaacgtcgacgccgaggtcgctgaagctgaggctatggccgtccccgataacactccccgcatcctgttcgaggacatctatgttcgtggctctgagcctaagtggatgcgtggtcgtactgtcgatgagactttctactactagattgttttgccctataggcacttctgtgcatcatggaagagctttttaattgttgtgtgaaggctcgggaagatattcttgcgtcgttctatcatttatctgtaatttagcccgatgactgtttcctcttatgtttgtttacttgtttcctgttctagagtagagagcaattgccatcggctgggtccttttcaagttcagtacatcaaattttagcaagtagtcttgcaatatcttcatcaggaattttaaacaagccttggttagcaatatcagccatcgaagatatataggcacgccgtccttcgcagtcgattatgggtatcacatcaaaaagaaataaaaaaagtaaaagtacaagcaagaatagaagggagacaacaagccatgtctagaaaaagtaccaaagcaaggctcaacctacatcaagcaggctcttgtctcaacatttcaagaatcaggtcctgagtccgctgcacagaatccaatttttcttccatcacaacacgttcgcgctccaactcacctcgaaactgagcctgcatctcctggcgtagctcttgcttcatttgctcaatctggatgtgactgagaccttgttcctgcggccgtgactgttggtgctggtgttggtggaatgcaggctgtacctgcgagtgctgtggttgccgggggaaagccagaaccgggggttctggggcagcttgtactaaagccgagatcatgggtgaggcggcactggcgtctatatcgcccccggatgcggcctctaggtgtttgttgagttttccaagtgtttcgatgacggctgagactatacggccgtcggattgtggaattgggggtgtggagggtagaggtgcagtgacttgtggggttgagaacatattctcaaaccccggtggtagtttcagtgagctgatcgcggagacaggtgtagagggcgattcgaggaaatgcgcggggggcgtaggaccagtaatcgagggcgagggtgtagggctggtagccgggagggcagtatcaccgacggtatccgcgacaggctgatgcatcatatccataattgaggtattgacatcagtcgggctagtaacagatgacccagacatgttccgccatgggtcctggtctccattttgagaattctgccgccagggctgcggctgtctacgtttcttgagctcatcgcgctttgcaatgcgtcgattctcggcttcttcccaccgctgccaggtcggaagccaagcatcgacagcagcgagccattgcgggttcatcaattcctcggccgttgagccggctgcgtttgagacccgctgtcgctggtcctcgaggaacttgatgcgctgccttgtgaccatttcgactttgcgccgcactgagtgccacgagtatgagcgcccctcatggacacgcttgaactcggcggcgatggatatccaccacttgcacagattactgcggctgccgaaggtccctgcattttggttgcagatctcgaacagcactatttcttctttggttgtgagacgtctatgctgccgtgaagtgtcaccatcgaactcatcgtcgccgttgtgattgcgcttcgtgcctctgttggtggttgatcctgacatcagccttgacccaactccttcgctggtttgagctacgcccaccggcatcggcgcatagtatagatcgctttcgacgatgcctccttcacgtgagtcacttttgattaggtttgcccctcgatgtgtcccttggctgctctgtgatgcgttatcggtcgtatgtggatgcctcactaccacggactgggaagctaggctgaaccctgagcgcaggtctgatggtactgtcccgaagtaattttgtgagggataatgatacgaaggatggcagtattcgtgtggttgaatgcgcgtcatgagcacagcagcttgcgcggtggccgagcagccgctgtgggagaccaacagtgcacgttgggtggtctattggcccaggggatagtctccctagttcaaaatagccatcaatagggtggcaatagtgtagcagaccaatgcagaaagtccttgtcgatctgtggggataaagataaagctgcgatggatttcacctgagggttttccacgaggcccgtgcgccgagcatagtatggcagctctggctccgtacagtcttgtatctgaggatgagcttcaatcgggtcatttgacaatttgatcgtgttttgattctgcctaattatatgtagctatttgaattctatagttctcataggatttgagtattcatgtgctgcacatttatactttcgcgatgtatatgttggagcttcaaccacctctaggtacctgccaacaagttctgtcatgtcctcacaacttcatgtgaggctctaatagtttttggggaaccagaacttagtacatcaagaataagctgctcgacatatctacctataacaggtaggcaaagcagccaggtctacgcaagggtcataaagtgactggctaatatgcagcatgaaacatcaacatcaataatatatccatttacgacacatcatggctatggtggtacagggggtggggttgacacaaaaagctccaaagacaggcaaaacaggaaccaacaccatggtcaacatgatccagaaatatgcagaaagggaggaagatctaagcgcccactaatacacagatgggaagtttagggggaaatagtagaacagtagagacaaacgaggaagggacaggctaggcagagaaagacaggccaatcgaatcctctaccaccgtctcctcaggtaccagccataagccggagtggcaatggtctcgccgaagggagtgggcacctcggcggaaccgggacgggccaccgggtggcgcaggtacacggctgcacaaatgttctgattgacctcgaggtagcgcgggatgaaggcaaaggcagacatgtattggcgtggttgccagggggtggagtaggtcttgctgttgtcgagaggattatcgcgcatttgagtaagagcgcgcttgagcgtctcgaactcttcgtcgctgagttccgaggcatcgacttcattacctagtgttgcctgcgagaaggcttcggagagtttgtcgcttactgcggtttctgtatctttcctggcggcagccaattccctatctcccttgtcggatgcgaaggcgtcttctggacggagtttcacgtccttattgtctggcttcttctcggcccgcttggccttgagaagcagggttaattgggaaaactgggcttccaagctgtctgcgaggacagtgctggactcggagcgggacaatacgcggcggacagcttgttggaagccacggagctcctgcttgcgttggggcgcgagtgtatccttgccggcagacatgatagacttggcctgtgccataagcgccttgagagtctccttaggatcctccttttcggtctccttggcctcttcctctgcggtctccttggtctcttcctctgcggtctcctttgactccgcctcaacctcttcctctgaggtctgtgccttcgcctttctccgaaccaatcggccctgacgccgctcgtacgcagtcttcgtatgaccagtagcgtacattacgcgctctggctcaacctggaaaaggtcaccggggttgaggagatagctgggatgtttcatctagcacaaaagcgagtcagtaaataaggaatcggtagcttcccacgtcgcatcataccttttgcccgttaacagtgaccgctccgtggatgacgaactgtctcgcctgtctggcactactagcaaagagagctcggaagatggctacatccaaccgacgctctaggggcgcaaaggtcatctgggtgtaaggtgtaggacgtttctggtaagcgggcttgccgcccatatcgagtcctgagccgcgaccggatgaagcttgggaaccgtcatcggcggccaagtcggatgcattcatggggataacactgcggatgcgatggttgaacatgcgtttccactgtccctcgcggacctgctcgccatgataggcacgggaagcagccttagcagaccatttctgctggaagaatgtgcgattgatggtgggtgggctgcggaatcgttgcatgttatacaggttgtatttgctccatgattgacggattttctgaacagtgtcttgttagtcttctgacactgggggaattgagtacagtgtagatacatacgcctttcgacaaagtattggtagctctgttcctcattatggcgattcggtaaacacaatgctgtagaaaatgatatgctttctagtccgaattggccgagtctcaaaacttcagagcacgtgactgtatggtattaatgccttaaatttcaggaatcaactgctggttggattcgatgtttgcctggtttgcatattatgtaaggggatcctcttgatgattggtcaatcaaatatcgcttgatgccaccgccctgtatgaatctgccaccgccccagggaaaaggtatataaggatgcctcccccccgggctcttcctctttttttttttcttcttcatacttaccttgtttgggtgactgtgatcaataagacggttcaccacaggctggtccctgcattgcacatcgcggcggaacagtttgttcaatggcactcgtgtcattgacaggcgtattctttggcacctccattcgtggaatatcttcttttcatcaatccttgagccagtggcacgagattggagacgagtaatgtactagttgatgcgttgtagccacacttatttgtaactaagtgaggccatggtgtcctaagcctgtctaccacgcgtgaaatctttctcgtgaaatgttcaagtctgcccccatacccaatctccccttctctgtgccgaccccgtggggcattctggtccttcgatatcatctctctggcacattcccgccatgtcgtgtcgcacctgccatgcactatcttcttttcatcaatcctcgagccagtggcacgagattggagacgagtaatgtactagttgatgcgttgtagccacacttatttgtaactaagtgaggccatggtgtcctaagcctgtctaccacgcgtgaaatctttctcgtgaaatgttcaagtctgcccccatacccaatctccccttctctgtgccgaccccgtggggcattctggtccttcgatatcatctctctggcacattcccgccatgtcgtgtcgcacctgccatgcacatgatttctttatcacttctcccttcacagctgaaagataaaaagtccggtgaagcattgagaaagatgtctactactgttgcaacttgccgctcacgtttgtcttaaatccctcccactgaagatacgtataccattcctgatctcttgaatgatataaagtacgaaatgaaattgtttggtatatggtacagaaaatattcttaccccctagacaacacatcgcgccatgtccaatgcatacaaatcccagtcgtacaacgttaagcatcttccctatgatcactatatcactctctcctagtacttgggaaagcctccgctaatgagtccgcttcttgcggattagtccattcctccagtagctcatgtgccatatcaacggtttcatcatcgatgcctgcctccagcacggtaccatcacaaaaggccaagcgggttaacacaacaaggtgtttctgtttgctgccaggtacgcatgccagtttctcctgcatattgatcaaggggccgtgtagccgcatgacaccgaaaatcagccgcataaggccattgactagcgcgacacgtaggtctgactctggcggagatgagtaaagtgcatccagctcatcatgcatcgaccggaataaacgagcgagtgcattcgggtgcaaggccaggatcgtactggcatgcctttgggattggcccatagggttgaatgccagtgactccagcagcagtaggacctcgaggcgcattgcacaaatgtcgcatgcagtgtatggctcgacaccttcgtccggtatggcgggctcgctcagcatatgcgtgaggcggtccactatccacttttgtacatccaattggtcctggtcagagttcctgatcggaccaaaagaatctgcacgaatacttgttgacaggatgttcatcaaaagcaaaatgtcacccagtggatgtgacgggtgcagcatcacgagaatgaacgagatccggatattttgccaaaatagctccattgcacttttgatgtgcagtactccacacgcgatttggtaaagtagacgcatggccccagtcgagtcgactaggggctgcagatctgattgtggtgtctgtcgagcaattcgtttatctcgtgatgccggggcgtacttgaagcgaggaactgcattgacttccacggtgtcctgcaagactccaactaaaggtgtaatcagttcggagagtggcacgtcatccgacatcagactatattttatgatagcttcgaaacggggaatcggctcgtagaacttctcgttgatggcgcgctgccacagtgaggcgatcgcttgcgtatattctaatacgtaactgctcgggtcagcatggcccatgatctccataatgaagctggacatgggttgatccggttccgagggaaacgcaagctttgacatggcttcgagatccgtttcttggttaggatgcatacggtgactcaaaagtcgcatcataaatcgctgattgcgacctgcctctgcagacttgcgcttcacttcatcgacatcggccgaaatatcagtcgcatcagtcatgacaagctccccaccagcagtattcagctgtagtggcacagggctatcctggcttgattgccgtttacgttttcctggaactgtcggcgtggctcgcttggaacgtgctgctgacttgctgggcgataccacggcgatttcatcatcgtcaaatccatcgcggagaggaagcacccgggactttcgaggagtcactggggcttccatctcgcgatgcttggatttgtagttccgaagctggtaggcttcatccacaaggtcttgctgaagaaatacattctctgtcgccaataccttgccttcggacatggctgcctcaacctcttgcttgtgtttcgccatttcgtcggccatggatttccgtagagccgctatttgccggtcgtagtcttgtgtcatcgctgcctgcttccttcgaatgatcgagatttcaccggatttcgtttccacttgcatcctcgcatcggctagctcctgtaacatttgttctctttcttgctccatctacaaggattgttagagtttatacaaagaatctttcatctaacccacctgcgccaggcgtgcattgatctccgcgggggcgttcccttgcgcatagtactcgtccacatccatggcatcgcccagctgctcgttgaccgcaaatccaggatctgtagcgagtacatgttgagcatgcggaatgacatgcgaattattgacattatcgtacacctcggcctccaattcccccatctccagtgtattgtagtcgtttgttaacccggtgtggaggcgaggcggcggtctaaacggtccagcattgttgtttaatggtactgcttgagtgcgtagcacggggttgttgtttatggggtttgggcggtactgtgaggctgacgcctgcgttgctttaaacgcattctgttctagttcatacaacttccccggtggcagggagtcgaactcgtcggagccgtagtcgtcgtcgtcgtcttccatgcccccgccatgaatggactaccagagggagttgacaggttccaacttcacggaaggcttttgatcattctcgagttcgagcggttccgagtgtggaagaggagagagcacggcagttcaaggcacctggacaacaaccctgcacatccaatttcaatttctagtcacgaacgtaatatctgaaggtcaaatgatgattgattcattaataaacccgaatagtacaccagatagaaaagatataaaagatataagcaaaaaaaaaaaaaaaaaaattgaacacggggctggagctgaagctgaccgctctcggcacttcacatgagctcatcaacttctaatccgatagtcctctctcgctctctgcacactccacttctattgcccagactctgtttctggccccccctttttgacatcatgtcgaaatctcgccgtaacgttaggtttcaacaccggtcgaatgatgagcgacgccccagcgtgtccgacgtcagcgatgcaccctcagagcccactagccccagcaaaactggcaacgggtccaacccatctacagtaactgaacaggttggttttcagtgggctgtgacctcaggatctaggtctgacatgatcttcacttctagaaacccccgcagtccgaatatgagaagaagaagcaaaccttcatcactcgaacgatatggacttttgtgatgatcgccggtttcttcgccgcgttgttctccggtcacatttatattattgttctaattactggcattcaaatcgtctccttcaaggaagtcattgctatcgccagtatcccaaataaggagaagaacttgcggttcaccaaatcgttgaattggtacttcctggcaactactatgtatttcctgtacggagaaagcgtgatctactactttaagcacattctacttgttgacaaggtgctgcttccattggcgaaccatcaccgcttcatcagcttcacactttacgtcatgggtaagtatctcgattgttccccttttactccactaacctcggttgataggattcgtgttctttgtcggatctctgcagaaaggccactaccgattccagttcacccagtttgcttggacccatatggctctctatctgattgttgtccaagctcactttgtcatgaacaacattttcgagggcatgatctggttcttcctccccgctgcgctggtcatcaccaacgatatcttcgcctatgtctgcggtattagctttggaaagacgcaacttattcagctctccccgaagaagacggttgagggattccttggcgcatgggcctgcaccgttgcctttggttatttcatgaccaacttgctgatccgctacaagtacttcatctgtcctgttaatgacctgggatcgaatattctgaccggtctggagtgtgttccgaacccggtcttcacatcgcaaccttattctcttgaaatctttggcctgaacaagaccttctgggtagcacccattcagttccacatcttggccttcgccactttcgcttcgctgatcgctccgttcggtggattctttgcttctggtctgaagcgcactttcaagatcaaggacttcggcgagtccattcctggtcacggtggtatcactgaccgcatggactgccagttcatcatgggcttcttctctttcatgtactatcacagcttcattgctgtttataaggccagcgtgggtgatattatcgagaccgccatcaacggtcttacggttgacgagcagctcgaggtcgtccgtggcttgggcaagtacttgtataatcagggtgccgtctcagaatcggtatgttcccttgaaccaattaccgtgatcgtcttactaacctctcctagattctggattgccttctcaccgagctcaagcgtcgatgaacttaaaaaattgtacggcattcagattgaaaacaccacacaaatttatgacactcatatttcactttcactctcaccattcgaggacgacttttcaaccccgcgcttcaccctgcaactctcctccgattgcttctgtgccgacgaccccctactcttgcttcttgcttcattcgggacttgatttaggtctaccgaatatgcatgccatccttaatgcgtgcatgcatgatatgtacatacatgcgccccgctcgccttatccgcctttcaacacggcattaacactcaacaaaatgacccgtgtcaagggccctaatgaacggtgtgaatagcgaaagtctcccacgccggaggcacggggacaactttttcattcttcatttacggctgtttccctgtacttttgttcagtactcttttttctattctattctattctattcccttcttttttttattgatgtcggggcctggaccgaacctaaatttgatgactggtgttgctcggtccatctggccaggagctttgctacactcgcgatgcgtggaacagacacatctctttacagaagtggtagaagaagggggggcatggtatgtgtgtgtgtgtgtgtgtgtgtttctggcaaatgtgcctctagtctcgctgtttttggacgcgtcaagacaacaggctgtagatctgtacatggctttcaattcagggtttgaagctgattcttaattttctttcactccatatttgctcctcgagaatgcgttcgtgggtacagcaaatatcgcccactgtgttgtcctagaatgcgaaaccgattatcggtagttgagggttcttttcattgtatctatcatatctcgtcgctggtcatagggtgtctgggtatcgagaaatcgtgggaaagaggatcatggtagaaaacttccagaatgtgaggctcgtgcccgagacaacttagttccgaaactgtagcgcaagaaacagggcgtttcgcctagtccagaaaagtggacaaacacctgatcagaactgagcaaggatgctagcgtatcccaacaagagtccggacgagcagccgatagcgagtcaccgtgaccgaagcattgttcggttgaaactaagatgggatatagtatatggggaccccatcccagctcattatcaagctatcaacccgctatcatattatcggttcacggaaccaagcaaggccttttctggctgtgcttcgctgcatgaggcacgccaggtgccaggaacacacacaaatagcaagaacatcttttacccgtcgacttcatattcttccatttcgaccttgaagtacgccgcgacctgtcgtctttcctcatctgcacatgcgggatcgagcatgaatcgaacggcagcatcacggcctcgctcgcctgttctctggcggtccccgttcgcagcaattggtgttaagggatgggcaggtcgcggagtatcttggccattggcgctagtgccgttgaatggtttgcgtggctggccgatccacgggtggtagcgcgggatattgtgttcgctggcttcttggttgagagggatgcggacttttagaaaccggtctgctgggaattccgagccgacggcggttagtgagcggtggtgggtgtagagttctaagaggtcgaagagggtctctggatggttgttaatgtggcatctaagtggattgaatgcgacaacaatacttacccatgatttctgctcggctggtgctccactgagcatagtctagccccgactccacttgttcgacgcgctgatctaatagtcgtcctgcaagctcaaggcaggcaaaggccatagtcgacgagttttgtttgatgggtgcaaatgtgcggtaaagatccgacgaaatgcggtaggcaagattggagacttcggagttctgtagcagtccataatgccgacctagcttcatgagggtcttgtgaggatgccgggttcgaaagtcaaaaccagaggcctctaacatgagtctttcgagaccgataatgccgcgcgcatgggcttcgaacatctggcgacaagcgttaattctctgtcttgtgtcgtctgggatcatgacttacaggatcatcagccgataagtgctccgagggcgccactttcaagttgtgctctgcgcagacaatgtctcgcgattttttgagcgtatcttcgatcttgcatgctgtgaacaaagccgcggccgcagcatcctatatcccgggttaggctgatctccttgaaggatttccaagtgaactcactgtgaaattatactcattgtctggatgcaccaatcgaaatcggtggtaatatccaactgctgtgtcaaaggtgcgaatgggactggatttccagtcagtcctgatgcattttgcttggcttggagtcaactcacaggttgagggctctccgtacgctgtcgatccacgctacgccctgaagacgcaatgaagtctcgcgaaggggattaacgctcatcgcttcgatacaattttcaattgtctgttcgaatatatatggattggccacctgtataaaagacgggtggatggccgggggtgacaggccagattccagtgttgagctcccgcgaggagactcttctctcgtatttgatgtcatggcggtttcttagacttcctagggatatggcaataccgagcaatgtctttggaagttgcaagatgaagacgcgcaacaagtgactggattgatatatggatcacgtgtccacctaagagctcgcaatcacgtgtaggtctatcgggaatatattattccgaagagtatatgtgtctctaccatgacgctttattttcccgaagacggatgtgcaattaaactaatgctggatatacctgaatagcagtatactgtctcacaaatccctcaagttcaaggaaccccccgaccagcccgtgtcgccttagccaactcactttgagctgtattatccgcatatctcttgtagatgggaaggtaatgcgcaagatcactggtagtctccttgatactccgtctgctctcaacagcagccagccaagtcctccatcggctccaaactccctcatccgcacccccttccccctccctcggaatccctaatccaccactcttaaactcatcaagcacccacagtcgtaccgcccacggagccaaaaccagatctggcagactaatatcttcaccaaggaagaacggtccctcactgtgcatctccttggtccaggctttcaggtgattcaaaaactcttgccgagcctgatccaaccccacatctgcgttctgcccagtgccatctgcaggctggtactgtaggaaacggtggaaagatgggattattcgagatgtcacatagtcaatccagatgcgtgcgcgggcacgctcgtaggcatcatctggcaagaagcggggttggtggtctgggtaagcttcttccaaatactccaagatcactgtggattcgtacagtggccgtgggtgtggatctgctggtgttgagagtgtaggaactaggcctcgcggatttagtgtgagtaatgagtctggcttgttgtatgggttgacctcgatatattcgtatggaatctttttctcctcgagggcaagccagactcgttgcactttattttgttaatattgttacttatggacgagtggctagagacataccaaatctgtatacctggtaagcagttggttggttaaagtatagaggggtcgtagacatacggacagaaccaccccgcatataactttaatggctgttcagcgcgatgcttatcgaccagcgccttggccgggccactggcctcgggatataggttggagtcaggatgagctgacattgtagagtgcaagtgggtgttttcaaggcaaggtggaaggtgaaaaagaatctaagttggacaatagtgtgacatcatatcttaagcatattcgtgattggacattatctctagcgggatattgaaattcaaaaggatagccttgcttaaatcatcagactctagtcttttccatacttcccgatcaacttctgcataatcaatatagcaccagatcgatagcctccaccaaaaatagcatgatgattcagatgatgataccttttggctatatcagtatacttctccaacagcaggatacgaaatactcacaattcatacaattccacccgatcagcatactccgccacaggctcagtcttcggtacaatctgatgatactgatcaaagaaccgagccccaaacccaccaaacatctgcataattccaagctcaaactcgctatgcccatagcaagctgacgggtcgtataccacatccccaggcggctcatcgtgacccgagccaataatccgaccccaatcagcattcccactccacaaatccccatgaacaacaacaggcacaatccccttcccctcaccggcggaagtataccccaaatgaccatccccaagcagccgaggcacaaccacatgcgcggtcttctcaaccgcctcgcgcagcccagcatcgggcccattgcgctcttcagatgtagctaggatcgtaagcagccgttcattcgcgtagaactcaggccagctgtcacaaaaccggttcggctgcttggtatcaccgcagaaggttggtacggggaatccgaatctgtgccggccggtgtccgggtccacaggtgcgggcgtggtatgcagtctgccgaggcggtgcgcgagcgtgacttcgtcatccgtgctgcggcccatcttgccgccgagctggaggaactctgttgcgaggaagtgcgttttggcctttgcacctggctcgtcgagtggaccccgagctagggcttgcggacagaaccctggcactgaggctgctattgcattgagagactcggattcgccttggaacatttcctctgcggctttgccttttgaggaggtttttacaaagtagcgtcgctcttctgtgccatttttggcgggaatctgggcgtggatggtgcctgtgcttgtgaagcctgaacctaatccggatgtggagaggctgacttttgattcggatgggagtgagagggcttgaagaatgggttctggtacgggggacattgctattagatttctggtgttaggaagaatagattttttttttaactagatgcaggatgcagagatgcagagacgcagagacgtagagacgtgaatagaccggattgcaaagggctatgacgtttttactccacatcgagcttttgtcaccatatgaaatgcttacagttcccatgtacatattcaccaagttgtataaatcctatatttagctatgagacgagatgagctcgtcacggtaagcaaaaaaaaaaattatgtccagattttcctacagtagtcctgatccatccagcaacgggtaactctaaccataacaaagatatcagctatgcaggagacagtttgttcagcaaatgcagcgcagtctttgtacgttccctcgtgtctagctccgtgtcatcctcgaggctagccagccgttccgcaaagccaagagaccgaagtctcactgcccgctcccgacaaccttcatgatcgctctgatcctcttcgtagatgaggttgatcactacccagacacagttcgatcgaatgtctttgttataatggttgaaataattgcctagagaccgcagcaagtcacggtggaacgcaacgatgcgccggtggcgtgggtgcccggccgccaagtggatgatgagagcggcggctgcgttgatgatctcattgggaatgtggagggactgactgctggagtctcggcggtgaggcagttggatggtacgcggtcgcagtgtatctgcgatggcatcaagcaaatcattttgaccgagttctttgaatagatattcaatcatctcaggtgcatctcgaccacagatcatgttgcgcagtaagtcgaatgcctgctcctggacggcaatatcgtcctgtcgagactgtgtggtttgagccagagttccgtgcagaacgagtttgcgcctacgtcttgcatcaggaaggaacatgtccaaactcattttggaaggaggcatggtatccgtcatcttgagatcctcgtcccactccactgcatcatccatggggttcagaatatcgacctgttcgccagccgagttggatcgacccatggcaaacccaggactttgatctgtttcctcttctatctcccgtcgagccactgcgcggacgggatcctgagagatgatctccataatccattccgggcccaaagtctcgatgatcttcattctgatgtcgtttgcggtgtcataaaccatgtgcttgagagcccagagcgattcgatctgtaatttggtgttggatgaatgagcgtgttcgcaaaggatgggaattatgttgtgggaaataatcgcctgagaagattatgttagctgcaaagtttgtgaacaaaatatagacatcgaccaacctctttcatgggactgaagtccaaggccaagttacagattgcagctgttgctgcaatttgtacctcgaggtcagaatggcgaagaagggcaaacagtggcttagccacgccggcatcaataagactagtcctaagcacgctcacggatctggtcagcatccgagctgtaccacaagcagcaagaatggtcggaatcgggtttccgtcctctgcagtatttctgggcattggagcatcagctggtgcatcactaggccttggcttgagggcgtcaatgatgtaagggactacgccatgttcgcaaatcgccttgcggtactcatccttaaatgggactagtgctgccaaagctttgagaatgttctctcggtaacgcattacatggcaaagggtcggagagtaaccggaaggtccgagccggcactcttgtggaagagactcaatgtcccgggttgggctactctctgcgtgccacatcggccgggatgtctccgtgattgggttgtaagtctccttgagaagttgggaaagtcgcttaagcgcattgccttctactgcgtgtctctgcaactcctggtcgtccatgaccaagttggctaataccgcaggcgcctcttcctttaagcgcaaggtcgacgagagcagcccatcatgaacagcgccttcttcatctggcagtcggacgttcttgtcaagcatacgaatcaagatgggaatcaacaaataactgaacattggaatgcgatgtttcttcgccaatcctaaccggaagagggccgtaacaagacgggcggacatcaaccgtgtcatgccattctctgatcggagaatgcagagcagccatggcacaatcgaattctcctcttcttctgggactggtgtctcagcaagtgaaaaaggcatggggtaggaatggctgtgtcggcgctgtgagcccccgtgtcccagaggtgggaaattggcagaactagatgattttgtgtgtgttagaggaaccgacggcaaaagctgttctatggggttggagccaagatgacggggtactgcggagcccgataaatatgtggatccccagggagctttcttgatatctgatggagcgaacccagcaacttgttttggaaacaccgtcacaattccaggcgatgacaggaagtgctctgccctccatttcgactgttcaatgatgacagcaactgcgcgcaggatcggtgctagctgggcggattcgggggccggaagtggcagatcctccaatgcaccaggatcttgaaggcgatcctccgcgccaggcagaacatatccttgggccacaacaaaggaggcaatcttgagtgccaaagcatccaacaccccggattctgctagtgccgtcttatgggtttcctctgtgcatagcttgccgattagagccgctgctaactcgatcgtggcctgagtacgcaggttcttgtactcctgcgagattatacgtctaagagaggtaatatttgcagaagcaaaaacaagatccgcaagctgtgtgtcccgaggccattgttcctggctttgcaacggtatccggtctgcaattgtgttcagaagccgtaaaattggaagacagaatgaatctgggcaatccgacgaggaaaatattgaaagcaaggtctggaggatattgctcgcgaatagtggggtgagaaacgtcggaccacctactcagtaaagtcagtgtctgtcttggcaataaggatctctagtcatcacgtaccttgtgccaaactcccaacaattaaagttgcttgaaggcatgcttcgtaatcttcgggggcttttggtgtggaccggccttggtgcaatatcgattcattaaactcggccgttcccggccatctcgaggtcagtacctgtgccaaagctggtatgattccctcgaaaatgtaggcttccttgcgctggtcatggccaatcaattcgttcttcagagtgcgcaaaactgtaatctgagaggaggccgattcggcactctgtagctgcagcagaatcggcggtgcggcagctcgcgtcatcttctagcgatcaccccctcccaacgggaggttctcggcgtttcactttgttggatcaaggaattagtagagaaattaaaatgaaattgaggaaatgatctccgttgatgtgaagcttgtgtagacctggatgtacaacatagatatgatggcagaccggaactgtagagccgggcctagagatactccgcactttggttctgcctacacacaccgttccagaaaagtggtcccggactaatgaaggagcgacaaccttactggtctgaggctataaatgtttgtataacgacactttgctacggaaactgaacattctgactgcttctatattaagatattctgtcaagaaatgtcattgccgagtatgatggggatagctagaatctaaccacacattggcatgatttccatgattgtttgcctttccatggaatctaagggtatgtattaggagtgtatgaatcttaatccatatttgcctgggtattgagatctataactagttagttatgtgtttggtagcctatattgtaaggccttgaccgttggtatcagtccccatctacatacagcactgcagccaatccgatatactgctggtttgaatctggggaatcagatattggcacgatgtaaatacaaccattagctgccatatacctatataggatctatatctatatatcttgatatctatgtagaactgcaagatatcacaatgtattctactaattgtcttggcactctaacccaatccagctagagtacggcagtttcaccccgcttcccggggctcggtagtagattcagttgattcccgtctgctccgtctgatccgtcacatccctgtacaatagatagaccgctacacaacatctagggctattaatttgatcaaaaagactgcgatccttcgctcgccaagatcagctctctacgcacctctatatacatacatggacatctagacagaatacaagaaaatagaaaaatacacatactgtaacggtacagtcaccggaagcatccagccactgacagcatggatctcattacctcacgaactttgaaaagaacaagattttcaaccggcttttgcccccttcctgttctcttgtccaaggccattcggagtgttcttcccagatcattccccctctttcctttggcgacatttggtttcataccatcgcaatcccttccgctttccctagccttttaagcctctgaggatgagggccggccgtgcacccacgccatccacagcgcgccctgacagtgcgcccacgtggtctcacctcgcactgtgaatgctcggattcccttcattccttaataacctagtcacaccctaaaaaactatgttggcgtcttcgccctcgccttcgacggctgcgttacgctccccgcttccttcaacttcggggtcgcattctcattcccactatgagccgactggcgctccacaattcaatagtcctagatcctcgcgtctggccatcgacgaacttcgctcagccttgaatcggcatactgtcgatccttcatctcctgaagtttcaggagatcttcaacgcaggcgcgcatcgacatccgacactctgaagaccctggtcaatcattcggccttggcttcgacaccccaatctacttcttccgccgtgactgcaaccaccccggcgactgccccatctacaaacccacccccagattcttcctcccccgctccctcgatgcccgccccaaccccgggctccaacaagcgcaatagccaacgcgaccatcactcatcggatgcgacgccggcggaatacgatggcgaagacttggaaagatcgcagtccaagcgcctgcgaccttccaaaccagaggtcaagatgttgcccacgcaatatgaactggccgaccctcgtgacatggtcgtgctgatctctagcatgctgatggagctgatccgtttcaacgacaagatcccactacaccagggtcgtctgactcgctttcactcccgctctccgccccgaatctccgtgcaagattacctccagcgattgacaacccacgctactctctcacctcccatcctcctcagcatggtctactacatcgatcgactctgcgcgctgtaccccgccttcaccgtgtcgagtctcaccatccatcggttcctgatcaccagcgccaccgtcgccagcaagggactcagcgacagtttttggaccaacaaaacgtatgctcgagttggtggaatcggtatgacggaattagccatgcttgaactagatttcttgttccgagtcgaatggcgcattgttccacaaccggaagtgctggtggactattaccagagtctcgtcgatcgatgcgaagggtttgaaattgaaggcgtttgccagaatggcagtgctaaagctggggtaacgggaattgccccagcagccggtcctgtttcaacataaagctggattgcgcccaaatacgccgatgcaaaatctgcacaaattacgttctgccctggaccactcgggctggtctcgagtcagccatggatgagtgggttcttccgcctgtcacccgccgagccactggcggtgtgaattaatacataccacttgcattagggggggtgatggtgtctgatctcgatgcaccattgcttttgatttaatatcgaggagcacaggcatcagacacggcgctttagaacagggatctatctcagcatataccaaaaggtcaatgggttgtaccttgttcctacttttcagcgattttttattttacggggcattcggcgtttgatgtctcacgggatgatgaggtgatatctatggccttttgtcttaaacgggtatttttttagaaccatacaaatctcaaatatcgactcataatctgagcattttaaattgtagggttggaaacgagatacatatggagcaactatcattatggagattcccatatacttctatgtctagcttctcgtaaatgtatttgatcgatgttcatttggagagtaaaccatataaaagaccaaagcgaactagcgtgagatcatgtttgcactgtttgcttactaactttgtatagctttcttcttttttccaagtcctcatgtgaatacttcctctttggctgaattattcaagtcgatgtcggcgattgaggcttaatgcaagcccaaggcactttcagttacaatcgcttttaccctatgacattggttgtacattgtcaacctatcctgcaacattctatctcaccccgcgcctggctgggtgccgtttgagatagctagaatggacgttgaaaggacaatcagaggcctcaagccccttgacgggcaagtggtccctattcgaacagtccaagagacaaggccccaagaagaattcggtatgacctacaatatcgccctcttcttgcgacatcatgattaaccaacaagtaggcgatgcctttgtcgcagaagtcaatgtgaagtctgcatccaaagtgatcaagtaagctatggactcccaagtttcccggtttaaactccatattaatcctcaattagggctatcgacgcggctttccccaaagacccttcccttccgctatcccacctccgtcgtttcgcgaaaaaagaattactcccgccgccgctgaaggcagccattgaaagccagagagttcctctaacggccccaacacaaactatcttcgtcctcatatcaccaccactgcctgatctcaccacactcaaggctctgctcgctccatttgcgccgcacacggcgccggccgctacaaacgatcctccgactacgaatgaaacgccagacgaagcttcacaatccgatataccaacccctactattcaactttaccctatcaaaattcctctttgcccccccttcaacacaactcaagccgaaacatggaccaagaccctctggccagtcatattcaacccagccgcaccgcgctcaactgtcgcgccgcctcttcaaaccctaaaacgtgtacaagaatctattgaaccacgggcagggtaccacctatccctagcgcgcaaagtagcagaggaagcagaacaatccgggctaggccgcggcgtaggcgcggtgatagtcgaccctgccatcgacgaagaactaaccgcggcaggctatgaggccggacatgacaccacgtcacaatgggacgaagcagtcctcgcggttgccggtgatgcacggtactcccgctccgaagcgcttgcaccatcacaggcccagctgcacgccggggtagcgccaaacccagcgagcaagatatatgacgcggatgtcgagggcgggcctgaactgcacgcgctgatgcgtgctgtcgatctgattgctcgctggcggcgagaacacgatcggtttgacgacgtgtcttcatcaacgactactacacatccatcgaagccagaaatagaagcgccagaactgagcgccttcgaatcatactttttataccgtcaccgtcctacatccaccgacatctcaaactcacctcggtctccgtcctccacattaaagagaaagcacgaagtccctaaccctgaatctgacttgagtatccacccctctacagacccttcccaatcccacgtctatcaaccacctctccctgctcctcccccatctaccgtggtatttgcggattctgctgctccgactacaacgccagcagccccgcgcatccgcactcgctcgcagggtggctatctctgcacagacttggacgtctacctttctcatgagccgtgtctgtgctgctctatgggcttgcttctgtcccggttcagatctgtcatcttccccagacgtgggaggttagcgagtggtggcctgtcttctgagccggttggtcctgtggccgatgagcttgatcaagccgcagaggctgatacctctacggttgataaggagggcgaaagaggttactacgggctgcattggaggaaggagttgaactggagggctcttgggtttgagtttgtggaggatggggatgtggaaatcatgggcgaggctgcaatgcctgtcttccatgcttgattgcaaatcatccggtataacctacatgttacataaataaaccaaacaacgtgttacaattttgaatacacttgagataaacttcctttgaaattttttttttcagtaaaaacaggctttttgacataccacacctggtattctgcgttctcgcgcaattcaggctgccgacctgtaacctccactctcttccaaacctccaacccattgtggtctgcaccattaacctccctcctcttccctactaacacgagcaagaaacgccccgacacccgaggctgaacatcaccaaccctcttcaacacccttctatgcagacaaagtaatcaagatcaagacaaggaaattcgggacttcgtcacaggatctcctgtatccacgccagatgtcaaatgacatggcaaagtacataaagaatttgataggaacagctcatggaaacccattcatctcggcctggtcatgtgcgagaaggccaagatggatttgaataaggtatccataagaaaacggagaggggtataaaccgaggtcaatatccctaagatacagcccaaaggtagactggaaaaaaattggctcaaagacaatgagttatggagtagcaaatgattcggattcgccacactgaaagaaaaggtcaaaaagaaaaggtaaaaacggagcccgggtaaatgcttttgtgaagcaaaagtgagatatgatgaagaagcctttgggtagagatgtggatgtcaaaggaccgccgtgccctatattgtgttcctctctccagatggctctattgtgaacggtgtttcatgtgcagagacgagctgtaaacacaaaaatggaacgagctcgccgatagatggatgttatgtatgacctgtcaatacaggcggcagataatcctctggagtgaggatcaatatgcatgactttgtggaagacacaaaactcgatgtgtcataggatgtagtgggtatgatgctttttcaacgcgtcgttcaagaagtgatgcccagcctaatggcgaagcttttggcgacaaacctcaatccatccgctggtagaacaatagataggccactttgtcgtcccgagggccatagcggcccaggggagttcggaccccagagggagcggcaggaggtggagtgactccgttcacggattttttgcttgcatgtccgttggcaccattgccattgacctggctccagcccttgtcgctatcagttaaatccatgtcatcctgatcaatgtggtcgaaaatattgccgttagggatcttgccatgcctgtgctgctcaagggcggcagcaagaaccttagggtcttcctcgccaccagcttccgccacttcctcgctgcgaacgcgacggatggcagtgtcgtccatgcggatccattccaagccttcctggcgccgaacatcgactgtgtagtgaccaccgctggcgttcttcccgtgatggtaaatcacacccataaggcgatactttgggggacctccctgggatgccatggcgttgcgccggtgagctgggaaaacctctcgcggaagctccaggtctaggggatacccaaccttcttccaaatcttctgggtggcacctgtgacactgtcgtactggaagcgcttgagatgaagaatgaggacaggaggcaaagtctcaatgaaaatttgtttggtcgcggttatgttgggtccgcgcgacgaattgaaatcaccctggatgctttccggctttgtcattcccttgagagcgtcgagaatgttgtgaacgtcatgagacccaatatcgagttgcaaaggttgatagggttctaatgtgacagaagtcttgttaccaggcaccttgaattctgaccgaagctttcctccgaagattctggtaaccggcgactcagcggcaagtgagccagacagttgggtgaccgctgctttttgcttgtggccaacttctaaccagccgtcgataggagaatcaccgccttctttcgctgcagtgtgcgtttcggcacgagcgcactcctcgtgcatctcctcgagaaggaagcctaggaactcttgggcatcctgctgatgtccgcgccgcatgtccctgaatcgtggcagctgtcgaaccatctcataaacaaattcaggaacgaaagagtcgccatattgctcaagctcattgggcttcaatctgagacgaagttggtcttcggaagtggccgcgtcaataacacggaattctttcatgaacataatcatcgcatcgatcaaaggaagatcgctgtggaaagtgtgcgcagcacgtcggccaagatgatcaaggaactgatagaacggggtacagaaaacaagaatttgcaacacagaattcatgtagcacatgtttccagtgtttaccagtcctcgaggttcaaggaacgcaatcttgtcgctgtattgagtgacatcttctcccaatttgctcaggacgtctgcgagtgatttgtttttctggataggcaatccgtgtggctcagccaaagcggccgcagccgcggcgcttgctgctttcgccgactccttcgaacggaccaaatcagcccaagacttgggtgcagctagcacaggcgagcttgtcttgttttctgtagaagaagctttatctgattctactactggggcaggagtaacaggtgcagtcgatttaggggttccagatgcgacgctgccatctttggcttggcgacggggggtagatggtacattgggcaccactggaataaccggagcaggctttggaattttcgactgtgcttgcgaccttgcaactgacgaaggggtagtgggctgtgtggagtctgcatccgactgttggaatgtcgtggttgttggggtttgaggttccgaaaattctcgcgtggaagaacaagatggctgagtctcttcgttttcatcgccttcgatgactatgtgcgtatctttggtgggaagctcaactgatgattgcataacacggcccttgcgacgtctccgcggggttctagccgggaagggctgctccggaacagagagccaaggaatctagactacctgttagaaaagtattataattcgagatgagagtaaacgcttactggtggggcaaaagtgggcttcggcggcaggtttgactgtggctcccatcgtggtggcggagaagcgataggatacccctgggccgagtggggtagaacagcaggatattcctgcaattcgggctgaatgggctgaatcgatggatgcaggacagacggagacattatcggttgcagtggagtcggagttctttgatgcatgggcatcgaatgaggaatatgcgtgggcgccatgacaggctgcgagtggggatatgaggatacaatcatcggtccatagggcgcctggtatggacgtggaggcccctggatatgtccatatggtggataccagtaagggtattgctgcgatgggtatggttgatgaggcatatggccattcatgtgaggagggtatcccatgtactgtggtgatctcatatggggaggcgcggtattgtaagaaaagtcttgctggcgccttgaaggaggcataggcagctgcccatgcggcatggcagggaggtggtggttcatcttgagctagctagagaaaaaagttgtcttgacgttcggtcacgcgttgcctcagatgagtgccatgcgcgatagcagtcaagaggaagaaaaaatctggagatgctgtcgcatttaggcagccatcgtggcctcggtaagaggtgttggatatgttggatagttggagtgaaggatgaactgcgtcgaaagagctgttggtgttgctgggattggtggaaggagactggcaaaccagatcggagtcaggaaacaagagaaagagatcgctgtacaagtaactccctaggcggagagagtcaacaagtgggtatgagaagcgagtgagcagaaggagagaaaaaaggaaataagagacaagggttaggaggcctcgattcaccgtcaaacgaaatgaagctgaaggagaccgagaccgaattgggtgtcgggactacggcagcctctaacccccagtgcgccatatcagattctgccagcagtatgcttcgtaatataagtattttatacgtttcaatatatcaatatcacaaaggcctctatataaggtaggaattgaagtctaattcttaatgtttgaattttcctctactctctacattttatccgtatatctaggtgctaggcttatcatgaatgtctaaagtagaaattgtgtgaaaatcaagaactaactaccccatacggagttcgtaatcagtaagtaatgagatctggcggtgaattaggcggtcaaaatttaatataggaaaatcgccgggacttgttggttcacgtgacattacgatttgtaaccggagaggggcgaaaccgtaccttcacgacatcaactggcaccctgagggccgtccctcgatcctcactactattcttacatggcctctagggtccttcattctacttcacctcttctggtccaatctgaggcatctggttgatcactcgatctactacccgctagctgattgacatcttatcagttattggctttatccagagtctcccatataacccctcatcttctattcagccaactggctcgcttcgtctttctgccttgtttagtctattgcgctctcactgttgcaggataaataccgcataccgcagagatatgtcatccaatgcaggacagaacctgccctcttccaaagcggtaaacattccgaatacagcctcgtctactccatttcactcaacagctccagcggacaacagctctcaaaagcgcgtaggaggccctggaagttctcgaccagggatgtcatcgaaagcttcagctaccccaaggaataatcaagctcggaagagtcaacataaccgtcaaagaaaacctcggctattggatgatgacgagtataacgaatcggtgggttcacaggtctatctcctcaagagctgcctgctgaccccggagcccctatctaggccgccatgaaatccaccaccagccggaagggacagacgtccatcactcacttgatgaacttttcacttccacctcgcccacaataccaagcacctcctcgcaacatccgacggtatacatcatggggagcgggcgcaatagacaaatcgcgttatgttcatgcgaattatcgctttattgtgatgccaaatcaaaatttccatgctcaggcagccaatgccgatgtccatctcgattggacctcggtcctccaagtgctggtatctgctcaaacacaggctgccagttgtccgatctgtctttctactccagttgcaccgcgtatggcacggtgtggtcacatattctgcctcccatgccttatccgttacatgcactcatccgacgacgataatacggtccctgaaaaacggcaccgttggaagaaatgtcctatatgttgggactctgtgtatatctccgagactcgacctgtcaggtggttccgtggccaagaaggcgatcttcccgtcgaaggcggtgatgttgtattgagactcgtaaagcgtgagtcgggcagcacccttgctctgcctcgtgatgggtccgagacacttggtccaggtgatgacgttccatggtatcacgtggcggaagttgccgactatgctcgaatcatgaaaggcggcgaagactatatgaccgctcaatatgatactgagatcgaagatctccgcagacaggaagtcgaagacgagcttctctttggtgatgagaatacttggacacgaaaagcaattggttctatcatggatgccaaagagaaactgaaaggcattggcaatccgcctgaggttcggccagccaaggaacgcaatgttgcacctacgccagctagtcgctcttctgcacactctgttgtggcgccagcaacatcagatgaatcggaccatctttctcgaaccctagacgacgtccatcttgatcctgaatccagtgccaaagctaaagagaaaggccgcagcaagcaaacgtcagtgtcttccgggccagatcaaccatatcatttttatcaggcattgcctcagttctatctgtcgtccttggatattcgtatcctcaaggctgcattcggagaatattctatgttccctgcaaccatcctaccgcgagtggagcacatatcaacaggccacattgtggatgatgagcttcgcaagcgagtgaagtacctcgggcatcttccacaggggtgtgaagtcagcttcctggagtgcgattggagagacgtggttgttcccgaggttttggggcgtttccgcgcagagactgatagacgtcgaaagcgtaaccgggaaaaagaagcccgggaagaaaaggatcgtattcgcgcggagaaagaggaggacgacaaacggtgggctgccgctcggcgcaagcggccaagcattggaagtgccagcctcagtgaagccccattctctgctcatgacttccaaccacttcctcgcaacgtggatcctacattatttgatgctacggcctcctcggcctctcctccgcgctcatcgtctggattcggggcattggcttctccttccaccagtcccccaggcatccgcactgtttggggcacaacggcagtgggttcactgtcgccaagccttgaagctcaacgagctgtacacagtgacgggtggcggcagggctgggaggacgagctcttcgcccagcaggaatctgatctgctcgcccagacggcatctggagaccaaagtcaaaatcccggaccatcgtccagtgggggtaagaaaaagaagaaaaacaaaactaagatcactttgatggccactagtagccagagaggggcataaatcttgatgaagccttgcgtgtttcacttttctcaattgctattgagctcgtactgcattatcatagttatgtatatgatccatttccccgaatcttcgggttgtcttaatatgtggttctcggctgtgtccgtatgctatgctactgaaataccatctccaggatactccttgagtacttctaaagccttggtataatccatgctactgaaataaacacaattatatttacatttcatatacaaggaacattatgtatatctgtgatgtcttctccgaagcagagggaaaataactgttggaaggttgaagtcagaagaaataaatgaattattcaggcaatattaaataactagtcaactccgtacgacatagctcaaatacaataaggggtaaattgcatagatctagggcttcaaaataggcagttgacaacgagctccccccactcaaccaccaattctccctaaatggtaaattgccttttgtggggggaaatactgcagtaccctacatagcactagcgactggagaaaagggtattctgccccttttagtatctatggagggaaatctacaacctgactgctatctgattttgaacggatatactccgtagatgtaccatatatactactaataccgttcacgctctactactacgcctatcacaggacataaaatacccccttatagacttatataccagatcaatacttgggtatcttgcagattttaaaattgtttcttatgtaatcattcagaaccggggcccgcaaagtaaacagtcagggcattccagttttttttcaccctcgctcctttttaccctcagccattcctctccttgccctcaattgcagtcaattgcagtcggaaccttggtcttccgattaagcgaccatgactttaacccgctcgcaaacggggaagacccctaagtgagtagttcccaccggaatctagttgcgacgtatccacaccctgaatcagggtatatcttgccaatacccggaacaactggcctgttcatagtaggctttttgtcaagctaatttggaaccctttcttcctccagaaaaatggatcgtcccggcttcgttgagacccccggcggccgtcgtgccacccgcaacagttctgtcttgggaagtagcgagaatgaggcctccctctccccttccccctctctctcgagatccaaatccgcctcccgccgtcgtgctgcagtcaaaatcaagaccgaggaggatgatacgccggtgaaggtcacgcccaatggcaagactaccgacaccaagcccgagtccccatctcgcgtgatagacggttgggaggaaggcctcgatcccaaggtcgattatagcggacactttgaattcggtggctccttgggtgtgctgtccatgatgatcggattccccatgctcatgtactacatgtggattggtgccacctactacaacggcaaattccctcgccccgcggagaacgagagttatggcgactttttcgcacacttggtcgatctcatctacaccggtgctttcccatcggtaaaggcatggactatctactgggttttcttcatcttcgagggtgcttgttacgtgctgcttcccggtgtaagtgtctccggtcgacccctgccacacatgggtggcaagcagctgccatattactgctctggtgtgtggtctttctacaccagcattgcattggcactcattgcgcacgtgactggggttttcaagctgtataccatcattgatgagttcggtcccttgctcaccgttgccatcctctctggatatattgtctcattcattgcctacttctcggctttggcgcgtggcgcagagcaccgtatgactggctacccgatctatgacttcttcatgggtgcggagcttaacccccgcatgttcaagatcctcgacttcaagatgttcttcgaggtccgtctcccgtggtacatccttctcggcctgtctatgggtgccgcggcccgccaatgggaaatgtatggttatgtgtctggcgaggttatgttccttgtcatggcccactacctttacgccaatgcctgctccaagggtgaggagtgcattgtttccacctggtaagagtatctcctgccccagaatcaagattatttcctaatatttcatagggatatgtactacgagaagtggggcttcatgctgatcttctggaacttggccggtgtgcctctgagctactgccactgcaccatttacctcgccaatcacgaccctgctgaataccgctggaaccgctacttccttgccttcctctttgtcgcgtatctgtttgtctactgggtgtgggataccaccaacagccagaagaaccgtttccgccagcaggagcgtggtactatagtcacccgcaacaccttccctcagcttccttggcagacagtggagaaccccaagactcttactgcggctgatggctccaagattcttatagatgggtggtgtaagttcaagacaaataacaaaaatctacaagctccaatactaacaaccgtatagatggaaaggcccgcaagatccactacacgtgcgatctttacttcgccctgaactggggcttgattaccggattctcaagcccattcccttggttctaccctgttttcttcgcttgcatgatcagccaccgtgctcttcgtgatatccagcggtgtcgtaccaagtacggcgagacttggcttgaatacgaacgtcaggtgccttacctgttcattcctgtgagtaacttgaccttgaggactctcccagcacctatgtctaaccttgtgtactctagtatctcttctaatcgcagcccgctgctttccctcggagtcattgagacctcggtagttgagaccccaggggattcttcttttacttctttaggtccgattagaccatcattctgccaaacaaccttggtgtaacatgtataaacaaaacgtcaaatagattattaatatgtaccgatcatgaagcaagatgttccggccatcctatgatggcctcttgagttattttgaacccaccctgtgacttttttatgactttttgtacgacaagtcatcggattccgaagttgatccagatttgaagacagtatattctattcaatttaatgtacggagtacaattggtgcattcaagcaaaaccaaagaccaaagacgtctacttcgttgagatgttggccagtatcagcacatgactgccccgcgtgttatcgataatgatttcaccgtcaatcgtctgtatttctacggtcgtttcaattggtttctcaattctattccaatatatttctatctttgaaagaaactaaggcaacatgctgatccaagaatcctatcatgacgtccccaccaaagcggatggacaggggacaatgcgtatgtacactatggtcgctctcgtacagcacatttcttcccgctataacgccattgctccttcatgatgtcaattctaacaatttccaaggcatctatgtcttccatccaacaatcccaggctaccccaaagcccgcttccctggagtcgtagtcttcagcgagatctatcaaggttcgtgtgctcttctattattgtgaccatgtcggaacacctcaactaaagacccgacccacagtaacgggccctgtggcacgctttgcacgccaaatcgcaggccagggctacatttgtgttgctccttcgagctatcatgaattcactggtccggaacctctgaagtatgacgcggaggacacggacaaggggaatgcatggaaggttggcaaggtaagcgaaataagacagcttccatggataaattcattacttgtgttttctattcttgttctttattgggctatacttgtgattaatctcaagcgctgagtcgctgactgtctatcagaaacttgccgcttacgacgaagacgctagtctttgtgtggattatctgctctcgctgcctacttgcactggaagagttggtgccacgggcatgtgtctgggtggccatttggcctatcgttgcgcgctagatagccgggtcaaggcgagcgtgtgttacttcgccacggatatccacagcaaaacccttgcccgaggcaagaatgatgatagtttggagagagctggggatatcaagggtgagatgctaatggtatgtatatatttccgttgtgtttcgtatgtgtcgatcgctaaaatctccagatcttcggcaaaaacgataaccacgtcccgcccgagggacgcgatctcattcgcaagaccctccatgataagggcgtcttgttcggtttctatgaagtcgcttgggcacaacgtgagttgaacacatcgctcaccctcgagcatcaatatgctgacaagaatacttatccagatgcctttatccgtgatgagctcagcaagggtcggtatgatccagctattaccaaggtctgctttgagatgctgcttgagctgttcgggcgcaccttgaagctggatctgggcgatcatgatgggcaaaaattggtgatcgaggatgtatgttagaggagcattcgagtacctgtcaaacttctcaaacgaaggtgctgattcgctgaaatcggacgctatcaattaatttccaacggggctagatcgaggtcttatagtaagtacatatgaatactccgtagaggtacagggtaacgatacggcactgcaggcgccaaacaggatgcatatatatcctgaacgttggatcatatgttgtatgtgtgtacgttcactaaattgtgggttgagtccacctggtcgacctggcgaccatattattgtcctccggcaagggtggtcaccacttatccctaaaaaaagaagagaacaaaaaaaaagaaaacaatatcagcactgggtctagggagatctgtacgtatccagaagagtagaggaacaaggactgtttctaccatatacctccgggcgagagtactattattagcgactggacccaaggaagcaccatttcccacgcttcaatttccaaagttcaattgttttgatccgattggaatcgcattcgagtcggattcgagtcgatttcgatcgaaattcgtcccgaaaaaacttggaagttcagacgaggttttttttcactctaagccactagcgccagccctgtgagtcccccgagtaacctgtggaaatcagcttgaatcatctcttatttcccatcagctcgctattcacgctgcacggctacacagctatacagctacacacggtttcatttctctacttcttcaccttcaaaacaacctggttccactagagatccaccgatctggactggtcctccacgcgggtcaagacgccaccccagtctgaacactctttgtcaacattgcctcacgcctattctgcctctcatttgaaatccccaattcaaaatggggtccactcaattcgggaaatttcacgtaagtgcggatcgattctggagaccgacctcctaatgggcagatgctgaccgcacaccctgtatgggtaccacaggacttctgtcgcgactcgaccctaccagtttgcaatgtgagtgagatcgttctcaaaattccctataatggctggaatgtcaactgactgtatcattcgtcgtgtacagcttttcaccaatcaaaccgcaactgatgccttcggcgcgtgcgatctgaccggcattcctctcagtggggatagacaccttcggaacttaggtacgatctgcaagaccgaggtcgatgtgattggggacaaatgatatgagcacgattgctgatttttgataggttcgattctgctagccttcatcgctattgtcttgagcttgggtatgatatggagatcggacaagaagcacgctgctgtcggccggaggtatggaatatctttgttcgctattgagatgtcgactgacatggcggtatttgcagggaaatgcaattatttttgctcggtttcatcattattgagatctgcgaaatattcacagtgggcggcttcccgctgcacgacgcagtccgaaaggtaggatttctacatgatagactcgaggcctcggctgacagaaacatctagggattttctgcagtacacatcgccgcgattacggcgaattgctgggtccttctcatgaacgcactggttggcttccaattacttgacgacggcaccccagcttccatcggtctcatctgcgcatctgctgtggtcctcttcatcgggacaggctatattgcattggacactgcattcgattggactggccgcttccagtcaagccatgatacaccaaatcgcaacatcgccctctatgttctgtaccaactcttcccactcgtctgcattgtcttgttctacgtcctagaggccgtactagtgcttcgggttctgggcgagttccgcccaatgcgtaggtttaccacactggactcaaaataaacatgtgctaacggtgcaacagtgtatctcagcggtgctggcttgttgttcgcaattggtcaaatctttaattatgttatcagcacccacctgtgccaggcctcgcatggcaagatcaatggagctttattcgaaactctcttcaccctcctttctgtctccggggtctgggccttctggagtagtatcaccgaagacgactggcctctgcccgtgggtggcggtgcttataactgatttgataagtattccatttgcattatctattgactttgctttttcagtctcttgcgtgcgaatattaacgcctctaattattattttttgccatacatactttctttacgcttgtttacgagtctggatcttgaactgggattgtcgacgttgtgataccccatttccttgagtcatgtttcacgattcatctgccatctcttacctttacggtggttatcatgccttgttttgtgactcgttccagcccatctgtgttttatgaatttacctgcggcagtttcgatctgccagtctgactactggtcgaccacttccctgtcggcgtttacccgttattttgttttatgagagatacctcctcgccatgtacttagttgtaacccatgtcaaataatcgactttagcttctcctttcccgagttcattaacgctaactaaaacagccgattctcacccctcatttatatgaggacttttgtgcaaatgcccctccagtctcttatattggtctctgatgctacctacccccagtacggacattggggaaagacaaactttctaatgcgactcggtgttaccactagggtatgctagtttgcacatcgctttatacgccatctcccaattggccaccagtgtgacatccatgccgagggctgagtgtccatcccttgtgctgcgactcttagtacttcagtgtatataataagcaactatctaatccaacaacagcgtaactcccttcatagcccaatagataccgaatttggacctacccctctcgtttctttgttcttaattctctccagaagttgtcgaatatgcgcttcaatatcgccactctcgtcctcgcctcggggttcgcctcagctacaggcacagctcatgtggtcaataatacctacatccagacctgtacatataccttttcataaatcaattattcgaatgcaagttcgataagctagtatactaatacaaggtatacgcatagtgcaacaacagaatctagatatcgtccggcagctcccacagatgtgtagtctcgctgcttgtctcaacttgacagcccagattatgtgtattgctaatgccattatcaatggtgatccggctgctctgcagaagtgcttaacgacttccatgagtcaggtatatttctgccttcatcgagtgaacaaagactaagattcgagtctaggtctgctcatgtgttgcttgtgttccagcggttgagaatgtgcttgttgcgctcggtatctgtccagtttcgagtgatgtagacgacgatgagccttcttctgggtaatggccatgcagtcctcggccacgtgctagttaaaggtgttgtcattgcatgtcatacatagtttatgcttctttcctagtgtaataatgctagttaattgtctttctcctcttctcatctctatcggcgttcatgattaacttagtatcagggacatataggcaagggctccaaggttagataaatcgcataatgtcagatgtagtcacggctttcaaggttgggttaagttacgacagtagaggaatctatatctctagcaaaagtcatccagtgattgtcagattagtatagaattagttatgtgcagtgggtatttagaggtgttcaagaaaggaggatatcgagtcctgcacctgaactgaaaacacgagactcgtaattaatgtacgtgaaattcaaagtgcatttgaatgtatcaacagggaaagcttaaccaaaacctttacacacctcatagtcgaactttgacatcgacacatgggagagtccactcccgtctccccaagaggctgcgcacccactccaagccgactcctgtccactcggtgggccttgactccattccattaggagaaattcgttgctggacaccctccaacacagcaccggctaaaactttggcggtggagttcatagtatcgaaaacaaattccgttagaccctcgccagacactgttgcttcgtatgtggcgttgcccgaaatggcatagttgctaggctccgaggtatagcgtggtgcaaaccaattacttcgtaggtcaaagatgcaccggtctgaccaatgacatgacgagacgaagagaatcaggagcaatgcggagcagtagatacatggccggtggatgatgtatgtcaaggcaacaaacgagatgataaagagcggggaggcgttggtaggaataaaaagaagaggtaaccagctataatatgaatcatatgggttagtctgaatcccctactttgctgctgattgctagttgattgcttctcttaccttcgtagacagaacatgatggggtttgcgggcgctggtcttctgacggacggaaaggtgcagattgatggacaaaagttttatttgacgtgagttggatatcctgataatccagtgagctcaccaccttcgaactcagtaagtgaaagtgggttaaaagaagtaacagtaatccgattcactaatgacgcgagtcgggcaagaaataactagccacagtcgccacaactcggcaggctccagccacacccacggcttgaacaatattaccgagagttcttctctccttcatcctccctctctacttcaccacgttcttcaatttcatctctctttctcgtacttatctctgatttgctcttttgccgccttttctagcctttgtgatttccaatttcatactctgtccctctcgaaagagagcttctgagagctctgcaaagcttggatcctatcggcggaggtcgcctgtaaccacggcgtaacggcagaaatgtccacccccaccgatctccaggctctcttagccagtatccggcctcgtccttctccttcaaacactcctggccaggataaccaccaggcccagcgccaatcgtattaccagcctgctctgttcccgccgcaccctcaacagcagcaaccttacgatggtcagagctaccctcatccccagtcgcatggttaccaacatccatcagtatcctcaacttcccaaagtcctgccccaatgaatgctccccctcatcagagctctgatatcttgagccctaacatgccttctcctcggggcgaatggccccagcagccgcaaccgcagcataccaactcaggctctgtggaccttttgaatcttctgagattcagccagcgtcccggtgcttctgctcagccgcaggtcccagctgcagctcccgatcacttgcagcccccgccggcccagggagctccttcgtcgcacggacgaaatatttccgcgtctgacttagttgctactttgttcggtcaacaggcccctgccgcccctgcggctgcgcctgctggtcctcccccggccttccaatctggtcagcctgagggccctaacgagaatacacaggatatgttacttcgcctgctcaaccgttctcggccaggtcctgctgtcgccgaatcaccggcgctggcttcaactcagcaggtaccatatatgcaggctgccgttgatgaacatcagaaccagacagccaagaatgtcttcatggaagttgtggatgagagtccaagggcgcctgcgaacccagaaacggtcgtatcgcccaactcgaaggactcaatgttcacctatgtcaacccgtttgaccaattagccgctatctctcctgttaataagtctcctcagtccgcttctggtatccagagcccagctgttgaagtgacgcagaagcaaaagatcaatgtttctactaagctggagccttcgcaaacacccgagcttgcggccccccgggaggggacccagtcgccaatcttgaatgaagatcagagagaggctgtgcatgaggtagttggtcgtttcgtagatgagatcagccgctctctcagcggcgatgagcctcgggctgcaacggaagtcaagactgctgtgcctactgcccaggagaaatcctctgaagcatttctttcatcaatcgctagtcaattgcgcgagactactgctgaagctaaagaagcggcaagcttgacccaggttgacgagctcgtgaaggagacagaatctcccacggttccagttgccctgaaggtgaccgagagcactgaggctctagctgacagctgggagagtgcggaagacagcgccgaaaaggaagaggaacgagttgtctctgtttacaacttcccaatgaggccattcatctccattgctgtgaaagctacgtctggcaaacttacgaccttccgtgacgacgatgtcatggatattgctcgtctaaagaaggagttcgatcaacttgacaggtcgctgacagcggctacgtccgaatatattgtgtacgcactcgccaaaactggtggcatcagaattattcgacaggacgatggtagtgaccgacaggtgttccgttccactcgtgatcgagtcttcaacgttgcgctgtgtacagctcctaccgcggctggtgactccgaagtccaggcaattctcggcattggagtcagcggctctgtatattgggctttgatctcgcgttctggaaaggatttctttgatatggatgccttggaaagcgaaagcttgatcttcccacctttcccggcctcggacgagaacacctctggtggccagctgaaaacgcgagccaagcggagtactcgtcacaccaacttgtttgccattggtcggggcaagaacatctacgttgtttccccaaaggcagcaatgagccctgcctacggcgtttctggtacccagcggacagttaacaccgagaaattcttcaaggagcgtgcattgaagatttccactggtaaagccggcaaagacttcgccttcagcgatgatgattccgtcatcgcctcattggacaagaccggccgactgcgcttctgggatataaatgatatgcttaatgacgcaagttttgtggaaggccctgctcctgccgagatccgggtgcccttgactaccttcgtcactggctccccaaccgaaaagtcctggcccacttcggtcctcttcctcgataagcttcgcgcttattcgcggtctatggcgctccgttatgttttggttgggctcaagcaaaaccacaccttgcagctctgggatattgggctgggcaaggccgtgcaggagttgaagttcccgcacgagaacgagtccgatgctatttgcagcgtggcttatcacccgtcatcgggtgtcattgtcgttggccatcccactcgtaactctatctactttgctcatctttcggcccctcggtacaatttgccccagatgtcacaggcagcctacatccgagacctgaatgataaggataacaccctacctaagcccgagtccactgcttgcttgagtggaattcgggagatctctctcggttccaagggtcagctgagaagtttggagcttctccctattaccaagtccgctactgacaagcgcggcaccgaggaaacccccctatttgagctctacgttatgcactcgcgcggtgtgacgtgcttgaatatcaagaaggaggatttgggctggactgcggataacaaggttattcgccctattgatgcgttggagcaaggcgtgattgaaatcagtgatcttcaaactttccccacatacgccaccgatgatccatctcttaacggtgacaccgcctctatccagtctcgcgttggtccgaaggagtcggcgaaaaagccagagattggagaattggcttctggagttgctccttcgcgtaacgcttcgcctatcaagttggctaagaagaaggaggagatcagtgaggcacctgccgtggtcgagaagtctgaaaagaagaagaagaagaaggcatcagctgccgccgaggctgccaaggcaaaggagccatctctcactgctggtgtcgaacctctgccggtccccgccgccgctgccaaggaactacagactcttgcctcgtctactacggcgatgggtgccacccaggcggccgaacatgcagtgcccggtttcggtctgtcaagtgaagctttcagcaaacacattcagacactgcagggcagtgtttcaagcgagtttaacaagagtcttggccatgagtttgagaacctccatcgtcgcttcgatgatgaacgtcgcagctgggatgctgcctcgtcggccaagcaagaccaagtgttgcgcctggtctctagcacgctctctgacaatgtcgagaagaacttagcacgtattgtctcagccagtatccagaccgatgttattcctgtcatcgccgatgccacctctgcagcagtcaataagcaactgaatggcgctgtctctcaacagcttgggggtgcgttcaatgaggagttgcgacaggttcttcccaaggctgtcatcaatgctatgcagcaggcacctgtggtaaaggctgtctcggattcggtcgcacagaaacttgcacctcgcattgaggcggaagttacccgggtcatgcagtcttcgattgcccccatgattgagagtttggcacgtatcaccaagaaggtggagtcggatatggaacgtcacttccaggagcagattaactactacgaggcccaacgccagagtgataccgcaaagatcgaggagatgtcggccctcctgcgtggcttgtccaatactgtttctttgctggccgcgaatcagggccaccaactccagcagacccaaagcccgcagcacgagatcccccaccgcgagatattgaacgccaacaagcactcgactagacagccaagcgagaatcaggtgcgcatgccgcagcccttgtctcagcctgtgcttcagcctcaggctatcccggtccaggccccggtcccggttcctgtcgcttcccctgtcgcgcgatcccccgaggaaatcgaaatgggggatattgtgcagcttatcaatacggctcactatgagcagggcactatcaaggttggtttcaatcacttccatatattcggtgtttttactaacgttaaatttcttagtggctccaatcgaaccagcaagctgatctttttgacaacttctttgtccacatatctcccgcctacttgtctcgactttctgccatcgtcatgctctctgtggccgttgctgtcaccactaccatgcagaccaacattggccagcgcctccactggctcgaggtggttctccaaaatgtgaaccccagggtatgtcattatcctatctcaaatatttgtaatattctactaactctggctttttaggacacggatctccgcgaagttgcacctcgtattctggacatcatgagccagcgcctcaataccctttacatgtcagtcgttgagcgcaacccgcatgacccaattctgcgacttatttcacccctcgctcgccgtgctcgcgaactgcacgccagcctttcttaaattgcgttttatttctcgccttttgcaagtatatgaactcggggccacgatgagttcatgatctcgatacggacccatcaacggcgttattatcttgctttttagtatgacgtgtaatgatatcgaaggaatgacaaatacaaaaccagaaaaaatacatgaattcgatcggagaatatagtctctctggtaatcttcggggatgggtggaacggttatcttggtcatcaggtcaaacacaccttgacgaggttatgaagtttcctttgattaggacacattatttgataccaatgcacaccacttgtatttgctatttttccgagggcatattctatgctggtctaggcatagcactgtgaatgctggtaaagctttgttcaacctctcttgcttgtatttgtctagttcttgtactctcatgttattgagactctatcgcttaagattgaagagcatccggaatgacgaatggtgcaatgctcgccaatttctcgtatgtctccatcagctcgcgctgtggcccgttcaactgaaagatgacaccagctccagcttgaaccaagcacgatttcgatccggctagaaatttacgaggaatgatataatgacccacgcaacacttcgctctgctaatcaagcaattggatgaatccaatcaaagcgaagcatagccgtacggatcgatcaaatcccagatgcaattaaggctaggtcttgttatccccgcctgtggtctggtgaataactaagtgggcaggtctctctgactcaggctgaccgacgccgggctgctgaaacggtgaacgaggacgaggatggatcaccgaactaccaatgccaaagaatgacgagctggggtttgcaccccggaaaccacgcttgcggctgcgataactcgcatcctcccccgttgtgagaggtgtggccgtgctgtgtgtgtggctgatggttgagatggggaccggttcgggcccctcgtatgtactggtgctgatgacgctggaaatggtcgatgggaggtgatagccggcttttccaatggggacagagaggccatgtacaacctgggtttggtcagaaggtgactaagataggagggatgtaggttaggttatttagggaggagactcacaatactgcagattactaaaaaccagaccacaacttggatagtctccatcacttgctttacgtcccctggcacctcgccatcgacttgtatcttgcgcaagaattcacggctgattgacaggtagaagatagcgcccactccgatgggaccgaagaagccgacgaatgcagcctgggagacaaggtcgatctgcgggatccatttgtacatggccaagacgattgggaggcggcggactaggaggatcaatattcccaggaagatgagccgattgattggaatcacgctgttgttcaggaaggatgaccatgggcagaccgctccaaaccacatgaagacagacaggttaagaagcatgtcgattgttggttggagggaatcgtctatggtctcaaggcggaaccagtcactgtctctgttagcattcatgatatcatagcctgcatcgaggtgacctactcttgcgtgaatacatttccagcaatgaaacaggccagaagatcatctgttccaatcaaaccacaggttcccacgatgaacagctatttgagaggttagcaaagcaccttttggggggggggaattcgagatgaactcactgcaagagcaatggcaaacaccaaaaagctttcccggtcaacatagcgcttctcctctgcccagtgcaacagcttcctcgcaatccaaccaaccacagttccatagactatgctcaacaggatagtatatgcccaggtctcatagaaccacaacgccatcgccttccccgcaccaccgctatagctctggcttcccataccagtatactggaggagataaatggcaaagaaaaggaacgggtagccaagaccatcattggcgccagattcagcgataatgattctctgcagctcgcggggaacatgtttatcggcaaatttgcccttaacaatggagttggatagaacggggtcggttggggtcacgcatgcgccgacgaccagggcatggaggaacttaaaattcggaaccatggcccagatcagtaggctactgcacatccacatggcagccatgcctggtccaaggagtagccctaggctccgccattcgatctgcagataccgctttgggagttggactccggctaggaccagctgcacgcctagcactaagcgggtaaaatgcaaagtgattacctcgaggttttcttcagaatggagtgcatagtcatctggtctgatgaaattggctgcatggggagagaataacactccggctagcagggagattactatttcatgttagcaaatgtggtgataccaggatgacttaacacttacatgcttcggataggtagaactgctccttgcaaaggtaggatactagtccgaatagggaaacaaaacctccgagcgttgcgcagacgatgttgaagttgatcaaggcgagtgtcggcattcttgtctgcactatatcccgcttggaatgttctgggttttatttgggggcgatcgggctcagatgtatcaaccaatggagtattctggattcagaagagtcagatcaatgagatctagagacttgggtaatgtctgtaggtcaaggtcaagccaatgttattgaatcatagtttgaatttcctgtgtgattgtaggcaagatcatttggatatatggaagtgactttgaagcaaagaatggtagcatttgtatgttgctatgggggtgaggaagatataaagatacgaagatgagatgtctgtggttgggacatcccgggtcttggcacatgacctatatagtacactatagtacacagagaactacagagtcaactagttacttgtgtactaattgatattcctattccattggatgcaacattctcgctttgttttttgacaaaatgcttagtagttttcatcaaacaattcatcgggcacctcttgggccacatgcagtgcctctgcctttgcagccacccctctttgggctccattgacggctaatttatcggcctcttcattgccggtgtctttattatgacctttaacccattcaaacaaggtcttcaccttaaggtcattgcgttcctcgattttgatcagaatcgactcaaccaaatccttgttctcaactggcttcttgtcccgggtcatccaattgttgcgacgccagttgataaaccatacggtaacacagtcaatcgaatatcggctgtcggtgattatggttacatctcggtgccgaggggcaatatcaatcgcccgaaggatcgcggtcaattcagcgcgctggttcgtttgacgactgccctttagtggctccgatacgtttctgctgggataagtgacggaagttagaagacgtggtggagggtagtgaaaatagcccaatgtgcgagtgtacgaaccttgcatcgccaggcccaaagtatacccctaccccggccgatgctaatggggtgccattccttaatgaactcccatcggtgtatatccggagcatcccagggatacccgttgattgcaattttgtcgcagtcatctggggtgctgtcttgtacaccacctggccagtagctgggtctaggatgacgttggggtcgaacccatcctcagctcctgtcggcagtgggccgtcacctggcgcaaactcgactccttctgcgttttttggcttttcgggcattaccatatgagggccagagggcccagttgccacaccgaacccgactgggacctgtgtctgtccttcccgtacaaattcctctgcctcttcacgggtggagaacttgcgatatcgaggtcgcggaaacccgcgaatctgctcctgtgccgttgtccagtctgtgtatactccagtaacccggcccctttggataccatagaatcgtgtgttttctgagctctgcgattcggttgggagcttgataccgttcagaaacgcgttggctgcttcttgcgagggaaacgattggactaaggagcttgtgtgtcagtctctagctaggtttgcgcgtctgtttggatacccagtgcgaagagcgcactcacagattgctcccttgaaacccgttatttgagctagacagtcattccatccatagtagataccgggtttgtgacccgccttaacggcataatatttggccggtgcatttctcttgcgtttggcgcctgcgaccggcgagggagagggtttggatcctggtgaagccttggggaccgggctcggcgagggtgttgtcttattcattgcggttgattgatcgtcgctagaggttgaggcgaggattgtgagggtggggaaagcagagaatggcctcttgtaggacccagttgttggaaattcactattcgatgttgtattcgtggctgggcggacaggaataaatcgaggaataaatcgcgggcagcttagaagggaacaccaaggtcccaacttcaaagctgaccaaacacggccgtgaattttgatttgtttgagatgtgtgtatttttgggttatgaatctgagaggtagagatgatcgcttagagggtcgaggaattgagaattaggaataaagaggggggaggaaggggagggggggagaatactcaatccagcctgttgccagcgcttgacgatcttgatctgacgccaattcctagttttgacgaggatattatttcttgtgtttggtttgattggatttgattggccttgttttcctatacgtttgtgctgattctagtgtttgtatatatatatcctagaccggtatatcttccatgtctcagatcaatctgttgatttcacactaaaaaataagacaaaagaatatatactaggtatatagagctaaagccctacgctcaatcgtctcaatatcgcctgcacctcctgtcgagtagactgcacgacatgctcaacagagaccaccgtattgatacctccaatactcgcacccctattgaagccattaacacaaaagtccaagagatacatacagtacagagtccggatactcacgcccagatagtccttcgttggtgttcgccagccgcctgagcctcattgtatcgtcggatgatttcctcgtcactgaccccctcctgggaatcctcgtaactaacaccaacaacagccctgccgtcgtactgcctcggaaagagatcagttgattggaatatgtcatgtcgaatagacttgatggttgagactccgccatccgtcttcgatacgatggtctgtttaatcgtagacggcgcagggcattccgaggttgcaacaaactagactcggttagcaaggttccatctccacgagaagaaacaagacctactcttgtgcccataacaataccatcggcacctaacacagtcaattacctgcaaaaaagtccggaacaacctacctaggccgagagcagcaatacatcccctcccatccacaatgccaccagctgccaggatagcagtgctcgtattccgagtccttgacagaagatctcgcacctcaggcaagagagatatcaaactggcaccctgggcccactgatgcccccctgcatcggtcccttggactactagagcatccactccctgctgaagtgcttcttccgcagctttgatagttcctacctggacaaatatcctgatatcccagtcagcagtctcctgggcctttcgaatggcttgtataattggaagatgatcggcgtcagtccgagggaacgacagccagactgctgctactcgatgcttctggagtatgggaatgacattgtcaacgagcccgttcggctggaaagtcaagaaaccgacaccaagcggcaatgattgaccatcgatcaaaccgaggatagagcgggcatttgccaactgagcatctacgcctagaagatgggtggattcagaccggaagtcaaagcctccaccgataaaccctatagatggttagtctaaggtctagcagttagttcggtttgctataccgaatcctccggcctttccgacggcagttgctaggccggcatctgtaaacccaaacattggtgcattagcaatgaatggagcagtcgtatgaggaaaccattgtagtagtatgtttgcagccattgtggtatggaggtatgaagagaagtcttgcgatgcggggcatatatatggctacctcgggatgtaataggtacgtatatatattactaatcgtagtccagttctaaataactagtttataacagaagagaatattgagcattatgtatgataacaaatatcatctgccaaaatattataggaaagtttctcgttcatagtactttaagaagcctcgtcctacatcaatcagtttcctggtctagcggttatgattttccgttaacaattgcttcaagcaagtgttccggaaaggttctgggttcgattcccagggaaactattttttggtctttttcttctcctcagaaagagtttttcggttgcgtgtggattgggagtggagatgggttgaagtggcgccgatagagtgggccagcgtgggtatactttttggagagaaaatcaccttcgcatacggttaaatgttgaatgcatgtaagataagaagaatccacgtagtcaaattataagaagataaacacatttacatttggttggcccctacagtctcgcacggaacgcgcgccttaagggttcgagagcagtaggaccatcgtagatctgctgctcgacaacgcgggtgttgacctaagagcagagttagtagaacaaacgacaaagtgatgagggggaacctacatgttggagccctaattgatcaatccgttccaccccaagcagccgcatacatgtcttgatctcatcgttcaggactaccacagagttagaaatagaaccagatcaaatacccagtcgacttactctccaatgttcgacgaacaccgtcggctccaccagccgctaagccccacagagccgggcgtccaaggccaactgctttcgcgcctagacagagagccttgacgacatctgtgccacgacgaatacctccatccacatagacctcgatcttgccgaagacctcggggcagtatttccgaatttccaagagagtatgaactgccggaggagcagtgtccatggcacgccctccgtgattagagagaatgatacctttaacctgaggtgcgtggagtgaggcaaggtatgcatcctcgtgagtctgcagacctttcaagacaataggcagatccgtctgagtggcaagccatgccaaagtgtccgtccatgtcaaggaaggatcggtgcctgcgaacagttgctggccgacacctccagacccttgggttggcttgggggtatcgtccgatgagcgctccgcggcctttaccccgctgggaacggcagcggtccgtccgaccatgccggctcgctcatcctcctcgcgtttccctggaactggggcgtcaagggtaagaactatgaacttgatcgccttgagcttctggatgcgtgcaagcatcgtctcactctttttgcggtcaatctggacataaatctgccagccaaagatttgatttggagcagcatctttgacgatctgctctggtgtcatggaagcgttattggaaattatttgcatggccccaaagctgcgacatgcttctgcgatcccggcctcaccagatgggtgacccagacgggccatcgccgcgggagacacgtaaactggcgtgttcagtttatgaccgaggacggctgtgtccagatcgcactttgtgcaatccacaaagactctaggtcgcaagagaatggaccggtaaacctcattgttgaagtttttgctgatttggtcgtcggatgcggagtaatagtatgcccaagcttttttgctcacttgcttggtagccacttcctcaatctcgtccaagttgaggagactctccataggtggtgggccctcaatttcttctgcaggttcagaggatgcctgctcctttggtaatgtactagcatcgatggttcccaagcaggcctcgggcttaagctcctcctctaatatacctggcgggtgaatgggatcgtactcctcggtggcatcctgcccggccaatttcaaaatgatctttgcaccgccggggtggctgcccaggaaatcggtgacctacataaagagtcagacgtggccggggaatgaataatacacaatgggaatcgaatgaaagcgtacatcgtagaccttgccgtacagaaccacccaacaactctcacgagtgttgtgctttgcgactatttcttcagtcagtcgaaacatcccgcgtgggggtcagggaccggtgcggagaagcaataccttctgtcgcatcgaatacttttgccattctcaatcacggtgcgaggttggattgaatggtagctcttagaggctgcgactgggtattctctggagagaggaatgggaagggaaaaaggtgagagaagtaaattggagatgcatctcgaaccccggagagtgtggggaaccttcggtcgctttttcctcgttggggaattttcaattgccggccaagaagggattggaatcgacacgacgttattggtggaatatatttggcctattatcaagaatcagaagagaaaagttcattgtatacggtatacatcatatacatacaacatagtacctgagtcactatacacttccaaggtcccacgtgagagccaagggttccagttcacccgcatctcttcccctcgaactcttccactgcggaacccaacttccttgaacttgtgacgtcggatatcattccacgaataattcacacttgaactctttcaacatttcgcgaccatgtttgaggtgtgtttaccgtgtttacctagaatctccctgtctacccaatattcttcatcccatcctgtcctacctcacccagtagtagtggtctgactgtctcagcgtcgtgcaggggatcgttatcgccttcgaatgcaccgagcccgttcagcagtgctgacctcagatgaaatggtcgaggtgcgtgcagcccaacgcacctttgagggggcctatgtccggactgctctttcgcagttctccttcgccctggtcgtcctcaagatcttcaccgccgagttctacagtattggggctctattcgcgatatacggcacgggagttctcatcattggacttttccgccgttcgcagggaaacagacaattcttctctgaagtaggagaggatgggatccatcggcacaaattccgtaccagtggaaatgcggtcttggtcttgacagcactgagtattgcggcatacgcatgcttgattggcctgaccttgaacctgagcaactgataaggaacattctgccttgatggttgcacgcgattcatccatacaccgtatccaatatccctggaggctatcttctaggcatgttatccgtgacaccccctgcgttaccgccaagcgccaaggattccgcacctgaccacggaatatgggttaccattttcggcgcttacggtagcggagatcagcgtgcagcaatggacgcctacagttggtcggagatcaatctgttgtgacgaggaccgaaagtcgccaaggaagccgagtatggatcagcccgagcggtgagactcaggtcatacaaggcgttccaataattattgttcgattcactggaggctgagttcgattcccaacacggagggttatctagcatcaactcgcggcgtgccctggtatcccttacaagacgggaaacccaacaggtatgagcattttggtggattatgaggatattgtagggttggcaaagtgcacaggggcgagattgagcatggttcgatgctccaccggcgtgtttttctcggacctgtacccgtatgctttctagccaagcattctctattagatataggaccaatacatcttgcatgattttgtgagacctccaatcgatgtgaagtctataagagctgttcaatcctggatccgacctggataccttgcatctccacatctttcccctcatgctgtatacactttgacatcatatgggcgatcttcaagccatcgatccaccatccagtggactaagtcaattcggcagcgtaatttcatcattcctaatctctgacgtccttggcaatatccttgagtgatattgtacttccacatattggacaccaacctcaaaataattacctttgcgccaaaaagaacatatataaaaaaaaggaagccaaccactttgattcttgcaaccccttgaatatctcaggtggtcaacatcagacccagtgtttcccgttggttgactcatccaaacctcacaacactttcccttccctcccctctcccatcatctttttttcagttgcccagctgtgacacaagtccttatccaactcaagatcctgtgagaaagctctgaaaaagagcaacattaccccttcttaataaaacacaaacacagaactatcccccagtgggatggcgcaacactctagcattgcccggtcggccatgacgtcggccacttcgcctgagatgggggaccagaggattgatattaaatccaacggcacctccaatagctcgggatcgggaaaagaaggagctcttatgcccccgaaaactgtggtcaaccgagcgctaggtaacgacctgcattccgattcccacaaatcttcactgccgcccaagggcggagtcggaacggctttgacagacactccggtttctaccgctcctccgtctccacagatgtgagtattgtttctttttttatctagaacctttgaacttcactatgttcgagcctatcacaacgaggcttgaccggctcatctcgggatgagttcagttccggggctctttgctgccttattctgagctaatctaccttaccccggactccaccctgttgttttgcattttgctgccttacgacttacttggatgcgcttggcgaccctgtgactaatatgatccttgcagatcgggcctttatcagcctccgggtactcccggtcgagtgcgagcaactaccctcgatatccccggattgaccaagtccaaagtgtctccagatggccgtattgcccagcgcgatgtcggtgcgaagcttgtcattgtcatggtcggcctcccggcccgaggcaaaagttacattacaaagaagctggctcgctacctgaactggctccaacatgacactgaaatcttcaacgttggacagcgtcgccgtgtggccgcgggaaagtccccctcacctgtcccgcttgatcgtggccatggccggaaatcaagttctttccacaaggatctcgttgactcggtgcgccggttgagtgtcagcgttagcaccactttgaactcatcagacatctctccgccagagaacaatacaccgcttccgccaccagtggtgccaaccaagattcttgtgaatggagaagaaccggaacaagtctctctcaaccaaagtactgttgtaccctcgatcgacgcaggttctgcacaatctcgtgagaacgaagaagctatcaatgaagcgtctcctgaaccaatggaccagaccgccagcttctttgacccccagaatcagcgtgccgtcaagatgagagagcaggtcgcgctggatactctcgatgagttgcttgagtatattctagaggaaggtggcagcattggtatcctcgatgcaaccaacagcaccatggaacgccgcaaggcgattgttgaccatattcgcgatcgtgctggtcctgagctaaatatcctgttccttgagagcagctgcgtggatcaggatttgcttgaggctaacatgcgcctgaaactttctggtcccgactacaaaggccaagacccaaccgaggcacttgcagatttcaagaagcgtgttgctctctatgaaaagtcatacgtgcctctcggcgaatacgaggagaagcatcgcatggcttacatccagatgatcgacgtcggtcgtaaaatcgtcgctcaccagacccatggcttccttgcctctcaagtcgtctactacttgctcaatttcaatctctctccccgtcaaatttggatcacacgacatggcgaaagtctggatgatgccgcaggccgcatcggtggtgactctgatctcagcgaaaacggaagaaggtacgccaaggcgttggctcgcttcgtggatcaccaacggaagcagtgggaagcatatcagcgacagaaacaccttctcaagcacttcccgcctcgagctggtgacatcacccctcccaatccatcctatcttccccaggaggggccacgcaacttctgcgtctggtcctcaatgatgcaacgctccgttcaaactgccgagtacttcaacgaagatgagtacgacgttaagcagatgaggatgctggacgaaatccattccggcaagatggaaggcatgacatacaaggaaatccaagagcagtaccccgaggagtactcccaccgcaagagagataagctcttctaccgataccccggaccggggggagaaagctacctcgacataatcaatcgatcgcgcacagttattgttgagatagagcgcactacagaccatgtgctcctggttgggcacaggtccgttgctcgcgtactcctggcctatttccgtggtctgaagcgtgatgaggttgccgacctcgatgtcccgatgggcgttctgtacatgcttgaacctaagccatatggggtcgagttcaaggcataccgctacaatcctgaatccgattggttcgattaccttcccaattacgaactgcatcaggtcaaagcacacgcctagaatttgaacatggaggttcgaaatttcatgacttgctacgacctatcatgacttcttttatgggatgaattggccggtgtttaaggcactggtcattttctattctccttcacttttccgctctttactggactgtatccttgatttttattttcctacttgcgccttgattatgtattatctatgctttctcccctccactgttttccggagcgttcttttattcttttacagatgacctaggcactcgttacatgacgggcgttttatctgtactttcagacctgcgatgctcgctagctttatgagctggaggtgacaggtcaccaagagcgtctctccctcgacgtttcattttcggtatctttgcaaatgcaccaagatagaatcagccatggttttgcttgatagtctcaatagctttacttgctacggcatgtcaatagaactatgcagacgatcataataacaatgaaatcatttaacataacggcatccatagaacattctgatcgatgactatatgaaattccccctaacaacattctttattccttctgctcggcctttgcctttaccttctcgaagatctccatgaaggcctctggttcatcagccccttcgacatgatatctcccttgcactgagatatacggcacacccgaaaccaacctgttggccgccgtcttggcctccaaatcaacctcctgagcaccaacatcctcatctaacatcttcttgacactctcccgatccaatcccgctccaacacccgcctccacaaggaccttcaaatcagtaatattcttctcctcctcgaaataagcccgaaacagctgctccgcaaccctcgtctgcaacccaccaacagcactaccaacagcaccaccttctccaccctccttcctagccgcctcttcagcctcccgctgcccagcaaaccaaagcaagcgatgcgagtcccgcgtgagaccagtattcccgccaaaactaaactggattccctcatccttgcccacagcagataggcgcgcgaagatcgcactcacgcgctcagccccgaatttccgggtgtacatctcggctttgtttacgccgggatactcggctgatgctgggttgaggtagaatgctttccagtgtaggctgaaagtgtctgctgggtatgtagcttggtgagtggttatcgctcgtgagaggcggcggtagccgacgtagcaccactttattttttatggttagtatgtaggtctgacggggtttcgaggaatgcgtatagatctgtgtcatatggttggaatacttacgggacagacggtgtctgagattatctggatctggaagttcgtcattttgtcaaggtgtgagggagacaggacaggtgaagtggaatttgggatatctttgctttcttgtattttttttgagcttttctttggattttggggatgacattcgatttgtaagcgttccgtccggtttcaggtggtttctctcgaatcttctaaaagtgtacattctcatgtgctgggagaaatgaaataattgatatatatcacaagtgtctccgaagttattttgaagtacacgctatcatccaacaattacacgaaggctctacaggtacttccagttggggacctgataatccagaaggctagccggctatatattcaaacaaacaagccctagaaagactatcacagaatctgctgggcctggttcaagttattccacgaacctcctgagctgctgtcgaaaacagctgatgagttggaatgaacaggtacactaggaagcgggtgatgacgggcatgatccagtgccgaggaatactgtgaacgattagtgagaaagctgggctgaaagttgaacgaaaacgattgggaagtctaaccttgaagacaaagttgaggattaaggcaactgccaaaccgatgcagactacgataggaccgaacatgttgtctaggtcctttccactccgctggcggatgagacgggcccgtctctcgtatatgaaccacccccaaactgcagcgaagatggcaaagaatgtgtagacgacagctaatgcctgggctacctggttgtgcttgccagcagcattgtagaggcccaatgataaactcgacaggaggatactgatgtgaagccatttgataaatgttcgctggttggcaaggtagaccttactttccacacgaacgggcccagcgtctttgatccagacgccggggtgtcgaacaccaggcggcaaagagacagatttcgccccaagccagcgccgaggagaaagtccgaaaaaccgaaagatggactcgaggcgagtgggccgctcgggttcttcctctggttcgggagcgggttcagtatcacggcgctggggctctgggattgatggacgtgggtgccgcgctgcaggctcggtgactgctgaggatctccgcatggccgagggagagcctgcactggagtattggtggtaaggtgacccgacttgtgggcgaacacctgggctgcgcgcgtctcccatgaagctgcctactgctatgttctcctccgctcgtcgagctaatcgctcttgctcctcatggaatgctgtttcaggatcacggcgaatatcactttcaagttcaccaagccagaagggaaagctgttgacatagtcttcaaacagtgaggctacgccgtggacgaacttggagaagcggggagcatccttgacaaggtgggagaccatcaggtccttgacccactcggtgttatgggccttgcctcgaagctggatctcgagcaaagcgtgcgggaagcgggtgatctctccagtcctgatagcgctgaagggataagtcatatcggcatcgtccaagtcggtacggtgccactcggcaggatcacgacatggacgttcactgtcgagggcatcttcccgaatgagcgctagattggtatcgagggaaatacgaattcgatcattgccaggaatttggaaggcggtgcgcgtgtagttcgcccggagcatgggttgcaggtcattgtccttgataaaggactgcagctcatccacgtcccttttcaaggcttcggcggcggccgactctccattggtcgaatcctccatgcgatggacctttttatcgaagcggtactcgccgtccaaaaactccttaacgtgcttttctttgagttgcaccttgacttttcgactttcgtcgtcgtcggtgacaatcttcttttccaactggatggtaggtttgtctttcaacgatcccgtccagcgcagtcgcaaagatccggcttcgggtgctcgtgcgaccttttgattgtagaggtcaaactgaggggaatcaaaatagagagaagtaatggtggggtcttcagtgatggtatcgaggtccttggaagttcccggcctgtagataagaaccggcaatcgacgaaggatgtgagtcttgacctccaaaacgttgtctgagtgaacccagaatttgtaagacgaataggtctcacggccaaatccatgctctgtctcccttggttgcacgatgtcctggttcagagtctcccgaacaaaggagtacatcaccgagaggcgatggaccagcggcgaatagtcttccgagttgaacggcagttgtgacagtcgcacttgaagcaaaggtttcacccgatatcgggctcctcgtttgcggtcatgcttctttgcagccttcaggaagccagtgaaattgattcggctgtacttttccaaggcactgacttccttggtgatgctatcgagttcttgcagaacttctgaggcaatagcccttttcttctgttcatcgagaatgggagtttcttgctccggagtagatgccaaaggtcggagtttagcttcacatgctgttgtccgttctcggagttgctgcgatgtctctgcttggaaagaattgaccttgtccagctgtacattgagcagttcttgcacaaaggcttcctcatcttgctcagtccattgatcgtcatcggagtcactgtcgtcttctgcgtcccgggtcacatcgttctctctcagcaaggtcttcagtttggtgtagtcaatatacttccctttccagggggggtacaccgcagcacggagggtttttccaaaccgcattttgagccagtccggttgtgcagtcgttactcagagatggccgggtggtctgattaggaggtttcgaaggaaggaagagataagagagagaggattgagacagatcttcagttagggaaaacaaggtaagagctgaggttcaactgcagatcgaaaaatatgtgcagacgccaaaagaaatagctcgttagcttttaaaacttgcagctttagaccgaaagcgttcgatagccaccgatagccgcacgtgctcattggatgtggccaatcggattctgaaaatggaccggaggatgaccagctattcggataatctctgttccgacggtattgtatgttactttacggtacaggagtacgggaagtacgggctagaccgatatcgccccccgtcgggaccagagagagggacgtgcacatggactctccgataccgatatccctccacaatccaagggatcctttgacctcttaagtatagacttgatggagcccaagtctacacaaacctcgggtctgtcccatcatcttcatggcgtattagccgagctacatcgtcaaccttatccttacgtcccaaatcctccaacctgcaacaagcgcgcctcggttgccttgattattcgggtacgaccaacctacgaccattggcccaactcaaaccccacaaaagatgcttctcagccagttccacaacgtttagatgagttcttctcacagcaatgggtccagcatggtgaaccggaggttctgttcatcaagcgtgcttcgcgcgtgggtgaccgatggactggtcatgttgccctaccgggcggaaagcgagacccggaagatgcagacgataaagctgtagccatcagggaagcttcagaggaaatcggattggatttgacaacggaggataccattagtgtgggcaacctccctgagcggctggtcactaccagctgggggtccgaaccgtgcgaatgccattcaccttcgcctctgagaattggattactgacttgaattcgcagcttgatggttctttgtccctttgtatttctcacaactcgcagcgactccccgacacttcgattacagcccacggaagtagcatcgacacattggatccccctgcgcgccctcctgtcaccatcgctgcggaccgtggaatatgtggatatgtcacagcgcttcgctcgacaaggcgggtttctggcccgtattgcaattcggtcacttatgggctggatgcagttctcggccgtgaggctcctcccgtcggaaacccatcaatgcactacaactccagggtttgttcccgaagagaatactctccaacctggcctgctccagcgtttcaaaggatggtgtctgagtgggcaagcggagtccagtgatgctgcccgtccgctgctcctctggggtctcaccctcggcatcctggccgacttcttggatatgctccctccccaccaagctgtgcagttgtggaagtatccaacatttaccgtgcctgatctgcggctgattgtaagcattgtgacttataatctgcggaagcgtaatgcgctcaatgtgagatcgggtgctcgtcctagtaacacggctgccgatagcgaaacggccgcactctcagtcacacaggagccggatctcggacatgatcacaatgaagtgggcatcggtggtctcggagtaggcagatattatggtccgaccgaccaagcaaaagatggggcttcttatgctgttggaatcatgctgcgcgggtattatgaccgcttgcgcatggcaatctgggttttcctggcctggcgtgtagccattggttcaattgttggtatttcagcctggcgaattcttcgacgactgcgttgaagtgtacattagcaatatacagttgcaataaagatgtaaataataaagatttcccgtacatcgaggtacatcacatgtttgggacatgcaaataccaaattacataaggaacagatcattacggcattcggtcagattagctcccccacatcctctctggggggtaaacattgaacattgaacattgcacacgactatcttcgatttcaccatctcctatactctactcattatggcggcagctcaaaaactttatccacgaggaacagtcaagcgcattgtcaaagcccactccaatcggagcgtgagcaagaatgccgacatcttggtacgttgtcgtcctgatatcccctctcttatccagttgctaatactacctttctagatcttcttagactatatgctattcatgcaagagtatgtctccatctatccttgtggcggttgcaacccaattggcactctcactgccgccattattggactggcgataagttaacacattgtaggctaatgcgcgaggcatcgattcagtcgcggaagtctgacgagaaaaacatctcagcgaatactgtgcgcaaagtcactgaggtgcgtttggtcgatctaagagcttctccggaagactcgtgagaacacacagctgacaagtatgggcttttttagaaaacactgcgcaaattccagggatagaaaagcccagaacataacctcggtctgcccattatggcgaatacctgcctagcatggttgtgaaagacgaggggatcctgtactaagactggcttgcattttgtgatattatggcgttgtgggcgaatgtgaatatgataccctggagcaatacaatagaagaaatgaataaatcacaaccaacagatcagttatctcataaattacgcgtttaaagatatagatagtactgtgattgcttaattgcttcgcgctacgcacgcgtcgaaagagagagagagagagtctacttaaagccagtgggccacaccgaccaaaggctttccgacccgcatgttgattcttccttcataacacacgtctttccttcaacgttatcgcgtttaatccttcattccagacctgtacaagcttttcagaaatactttaatatctgtgttacccacattcccatcatgcctcccacttccgctacccaaaagctcaaggacgaggagaagggctcgcgagcttcaagcgtctccaaggatcccgagagccccaactctgaaggtcaagagagtacctacttgaaggagctgcagaagtatgttcagaatcttatgaacccagtggcgtggttattgcctatgcgcaagtggaagtgacctaactgctttgtttaggacacttcgcaatgccatgaagaagttggtgagttattttcgaatgatactttggtttcgattgtttccattgacaaattttaacgttgctatttttctgactagaactcccttgccaaagtcgacgccatcatcgccgagaaccccaacaagtcgcttgatgaactgatcgaggagaagaagatcaacaacgaccagaaggcacaggtcctgaagaagccttcccttcaagctaccgttgctcaggctgaagagcagattggccactacaaacaatttgctgtccaatacgaggaccgtctggctgcccagaaggctgcgcttgtcaaggcgcatgaggcggagctcgaagctgtccgtaataacgccattgctgatgcaactgaagcctccaagaaggcactgcgcgagcatctctataccgtgactaagttcttgtgcgccgcggccatccttcgacgcgacggcgacaccatcaccaccgagagccgtgctttcgagggtgttctgtttgaggtgtacgctggcaaccagtctgcagtcaattcgcttctgaagattgctgagggtgccgatgagaaggtcaatgctgttgagggcaccattcttgattttacctgtcagtaatgaatttcccagccccaccctcaccgaatatctttgaatgtgcttgctaacattatatctatttagatggcgacgtgaagcaagcatccgacaagttcgctccgcctgaagaggttcctgaaattgcctcggaggcaacccccgccaccaaccctacgaccgaccctaccgtggctaacgcaggactgaccgagctccaggatgcctcattcggcgccgaggcccagcctgcagcttcccaagcggaccagttggctcctcctgtgcagactctggtttctgatgctgcaaactctattgcggagcaaacctgggctcctccttccgatgaaagcagcgaatgggtcaaacttcctcgcaatccagatgagaccgacactggccttcaggctactccagctagtgctgatgcgggtctgaacaacggttccgttggcgctgatgtttcgactcaaggcgagaacgctgccaagtctggtggacgccgccgtcacggacagggacaccgtggtggccgaggtcgaaatgatgctaagcgtactggtgagggccgcggtggcgaaggccgtgctggtgaaggtcgtgctggtgagggtcgtgctggtgaaggtcgtaccggcgaaggtcgtggacgtggtggccgacgaggtggtcgcggcggacgtggtcgaaacggtacaagcggtgctgcctccggctcggcggaagctcccgcctccagcgagtaagagtggcaatcttaggatgtcagttggaacatgctgttttgggatcttgtctcgaagtcgatgttccgacgagagattctaggtctgtctttccgggactggcctcagcgatttctggtccgatgtgatggctcacgaacgcaacgaattttcttcacggagagtcactttgatctcttcgtctggctttgccaaagtcttcttgaccatgtcctgcaatttttttcagcgtgcatattcccgatcatcagagagcttctctcacgacatacatatgtattctatgctattgttttatcggcgcttgtgaacggaccggtggacagggcttaggtcgggcatagatcgaaattgatcataatgagtgcactattactttccaggacttgctgtagatacccgtattttacgatttgggtcgctttagttgaacgaaataaggtctactaggtctactacttgaatacgtggatggtagtcaatggcgtatgataactagttactatagatgtactccgcagtattgtaccatagtcagtcacgtgatgtaactagcttggcgtaatgtaatgatattacacaagaccgaatcaagtgcggggcaattatgcataaaataatgtaaataacggaatacacttgaaatgcgcttgtaaaggcgtgttccgttattactagcgtgttttaagatgaaacccgtttttagcgcagggcgctaaaccacaataggaaatgcataccgacgcccagtggagctcctggcgtattcaatctgattaaaatggtctttgtgctcttgcacaagtgtcaacttctccagattcttgtccttctgctcatttttggttctttccgccctcctccttatatcttctactgtatatatggcaccagcaacaatggccgtcgctggcgcccaacgtaagggggtgctgaaggtgttgatgctctcgctgttgttagatttggtaagatcaaggtacccattcaaagtcaacaatcacatttattcaattaacaatactttcagatctcctttacattcattctgcccctcttcccttcgctgctatcgttttatcacgcgcaagatccatcccccgattccctcctcaaccgcatcttccactacctaaacgcctacaaaaattcctttgcgcgccccattgactcgcgttatgacattgtactcctcggtggagccctgggctctttgttctccctccttcaagcctttgctgcacccgtcataggccgcctatctgaccgtcatggccgccgtcgcaccctgctcgtctccatgctcggcaacctcttgagcgtcgcgctgtgggtgtcagctacggacttccgtacattcctcgccagtcgtatcgttggggggatgagcgaggcaaatgtgcaaatggtcaacgccatagtggcggatatcacagacgaggagcaccgcggctctgctatggcattagtcggggcctgtttcagtgtcgcgttcactttcgggccggcgctaggtgtagcgcttagcagtatcaatatggttgccgaaaacccgttcatcgtcgctgcaattgtgtcttttgctctaatatttattgagactgtgtatctttgggtctgtttgcccgagacacatccccgactgacgacgcttaagatggagggcaaaagtacctccacccagaataaggatgcattgggtaagaaaaccgaagataggagcagtgctcccgctaagcgcacccatacaaacaatccggcccttctcaatgccctccacttcctcttcctactcccattttccggtctggagttctcccttcccttcttgactacaacgctctacgcgggatcagccacaacagtcagccctgctgcgttgaacggacgtctcttgtccctgatgggcttcatcgcctctctcctgcagggtaccctggtgcgccgtctcccgccgctggtcaccctccgtgccggtgtcgtggcctgtaccatctcattcttttgccttgctcgcgtttcttcacctccaggtctctatgccgccggtgctttgttggcggtaacgactgctacggttgttacgtcactcaacagcctgggtagcttcgaggcacaggatgcggatcgcggcgcggtcatgggtggtttgcgggggtggggacaggctggcagggcgactggtcctattgtgttctgctctctgttttggtgggctggccgtgaggctgcttatactgctggcgggttcgccatgtgtgtcgtcacagttgcagctttcagcttgctgaagtcacctgctgtgcataaaaagactgaataatgtatatagaagcatactaataaaaaaatggtcacaatgtcttgctattcctttttaatacatcaacttatcagtatcagctccaaaatatctctgcctcttctagcttgctattcttcactcagtctggacatgtttctcggtgttatagttaggaggataacgggtagcagactacgatgtggcacaattcttacaaaacgacaattccgtgatttttcattgctgtctggttttttcaagtccgtaacagggtataatacatagaagagtggcgatagtatgtctcaaggattctaacagacaaggtcaagtgaaagagaggacttcaatatcaaaacagcccatctctcgacacccataatcaggcgccgtaaagccttgagtaagaaaacatattcgagctatataaaaaagacacaatacagcaagaatgtaaatatgaacacagaagccatcgtacgttctttcttgtcttcgagatatttcatttgatgacagattcgctcgagttatgatcgaatatgagggtgaagtcacgacctccggccactgttggaagcaagcccatgactctcaccggtcgccatggcaagtccagtattggcagccgggtccaacgagccacgcgccttgccaataagccagtcagtgagagtcacgaatttagcagtccggtcccagccgtccgcttcatcggcgtgctcgatagtatgagtcaggatgcgaccctcctcatcgaaagaaaagataaagatgccggtgaattgctcttcctttgacaacttgaagataggctcttcaccaccgagaaggacactcaagccattgttagtgccttttgtggagttcgagagatgactattttgtgagaatggggcatttttcgagggatttgtagaattgatattccaagaggctgggccatggaaggggcggctttctgttcgtggctcggttttccaccgtactagtaggcgctcatcgccgcagtcgtgatgggcgccgtgacgcgtggggtcgagtagcgtcccggctcgtacgatcctttcgctgagaatctgcaatttcacatttccgactagtggcacgctgctccatgctaccgggacagtccataatgccgcgcgatatagtgtgcgtcctttgacggtggggaggtgtggatgtgtggatgggaataggtgaaggttaacactcggggcgaggatttcggtaggtaaggtgttgtacaagatggtcggtaaaaggggtgagaggattcgtaaagctttgatcgttagttgaacggctttttggaaagtgaatgagacagtgagtacatactctttccgagtttcaaggttctctcatctggcggttggtgatcgtttctcccaaggccttccacatgctccctccgcacccaagccggggagaaatatgtgactggtaaaggtgcaactgaagttgaggtcaaccagggctcactgagaaggccatgacgaagttgcgccagtcgctgtcgcgaaaccgaagcaaaaagccggccagagacagggctcttcggctgattgagaagagacgtgcgcagggagactagcttcggcattctgcattttaaaagtatgttgtcaagccatgtagataagtggaaggttgaagttggtcggagtcgcggagtcggagagtcggggaaaatgacgttgtgggagccaatcacgatgctctggtatacaatttgattcaacttatatttactgactaggacgattcgtgacaggtctacagcttcccggggactaattaaaagtattattcgtaatcccaacctcaagccaattcatcatcgtcccccattcccatgacacgtcgttcagccagatcgcggatcttgtcctcaagaatgccacgtccataacgctgggcaattttagcagccgcctcgagcatcttaccgttgcggtccgtcatcaaggccaccagctccagcgccttcataccacgctcctcgccctctctgcattcaatggccagcatctgcagcaagttcttatccaattcgagctccctccgcgccaagtcagagcgttggcttgccgtcgcattggtcgatgagagaagatcgcggaagagcgacaaaagcacatttccacgtacgaatgactcctcgaaacgagcgccctcagccgccgtgtctccggattcgctggaatctttcggaagagtactggcaaccgggatctggaagtcgaattcactgagcagcggccgtggaaagtaagggttcttatcaccacccttgaggataatacagtggaacttgtcttgtgcgacagccaccggccagtatgtttcttctttccgccctcccgagagacgtgccatttgcttcgtgtccaggagcggtacccatcgggcttggccgggtgtgcgccagtgttgcagaactagtaggacgccagtcgactcgtatatacaaggatcctaagaagatggttaattccatagccaactcttctgtttagatggagcttaccccattatcagagaaaaaaacactctgtagcgaagccccttctggaagagcgacagtgtcttcgttttggcaaatctcgtcacgcttgacattctccaccgtgtatcgtaaggttgcgtggccatcaattcctatagggccgttgccgatgctcataatgtagtcgcgccaggccgcgcaagtcacggcttggctcttctgtcgatacaccttgaaaggtgtcccaaagagagtgtacactcgaacatagtgctttgatgtcacagtgacaatgtatgaatcgctgagcgccagagctgatagcgagaattagtaaggtgaattgtgtagtcctttgagttcttacctcggatttgttctccctcgggcaattcggttcgccagtccgctcgcgcagtccacgtctcatgtggcctgtagaaaatagtggccggactgccatctgaagggttattggcaaaaagtgttccgttgtcgtctatatccgatcagccaaaacccaacacaaaaggataagcggaaaactcactcagacaagccttgtcgtacatatacggatcagtgaagtggaaatctcgatgagcttcccggtcatagaattccacagtaacagtgtgatgtgtctcctggtccaccgtccagacagctcctgtcaagttcaggcctggccaagttagcaaatgcactacaatgagttggaacaagaacatacaaagatatctcctgctcccagcccaaggcgtgctaccgggttgaagaggcagatgggccttgggcttttcgaagccagagtaaaggcgtttgttactagtgtcgccgagatcatcgagatcatcgtggggccgcttgccataaatatttaactcttcatcggcatagccagccccatcatcatcctcgatgaaatcgatcatctggtcatctccaccaaggatatcatccaatgagtctggcgaccctcttctcgcggctcgctggatggcctctttggaccgctccgccagtgtggttcgcccaacattgttggagatctcgcccagaggcccaagtaagataggagctgcctgcagcggtttatgcagcagagactcgtgatccctcggtacaatgttatcatagatgaagagctctccgtctgaagttgtaaatgaaagtgagtttttggtcgggtgccaggagaggttcaagacatttgcaaactcgtatcgctgcaagatcttttgcgtctttgcttcccagagtacaatatatccatctgcagctgcagacgccagaagagatccgttcggggcccagctcaaggccgtaacgtcgccggtatgaccgccagcaaatgttttctccttcttccattccgaggttgagtagatcgagatatctctggtcgcttccgcagaagcaaatgcagtaccatcaggatgccacactgctcttgatgtcgcctcggcatctggccccagtcgtcgaatcactccatcgagtttgcggaccagctccggctcctcttcgtgcatagagtatatatagaggattccatctgttccggatactgttgcatatcggccactgggatcgaatgtgacatgcttcgttcccttagactgttcccggagatacttgacttgcgtcatgtcgtcgactttcacgattttgactgtgagctcactagtccaccagtgtcagcatccaatccactgtctggcacaatctctacagcacttactcgcttgctactgcgacccattctccatctctcgtcactgcaatgtccctgactggcaaagcacatcggacaagcaagttttgcattttgcccgacatcatgtcgtacttccagactgttccgtcctcggcacccataataaaagaccgattctagcaatcctgtcagacctttccttcgatgcatcgtaagtcttattccaacataccgtagcaccaatgccgaaatgcgcgtcaacaccttcgtcgatcgtcttgggctctccatcttcgccgaccgtgtaaatacgaatagccgagttggagccaccagtaatgattcgtcttccgtcgggtgtgtaggccagtatcgttgtgccaggtgtgtctatgtggaggccgccttgtcagtaactattgtagtctctaggtcatcagcatgactcacgggctgggcgcccccgcgggcgaagagggtcgaaactcattgcaaacgaggcttggcgtagatatttcaatcaagatgcaactagaaagcctggagcatcgttcgatcttgatctggtggatcacgaatagccagggatctacaaggtcagacgcgtccgcgttacgcgccttgattgatttaacccgattggggaatattatagggctcagggcttagggtaagggccgctttctccagatattccatcttattgttcgatattgagtttgtagctgaaatagactctaagtgctactagcacctccagctgtcaggaaatcgaaatctgctcccccttgtgcttgattcactgatcgctcatacaacccgcggtagcctctcctctgctttcttacctgcgtctctcccacaagactctgtctgcgtgtctcgattcgagtctggattactgcctcggaaacttccaagtgcaacttcctagtttcgatgtcgcaaataatcaggtcaccggtctctaccacgccaaatggtgactctggtagcgcagcttcaggcgagatatggaggataatggttccgcccgcggtccctgacatccgaccgtccgaaagtcgtagcatatccttcactcctgcctctgctagcttctttgggatcggtataaggccagcctctggcatacctgggttgccaatcgggccaatgttttttaggaccagcacactgtccttcgtcacaacaaggtttggatcatcgatccgctgagcaaggtcggccgaattctcaaataccacagccggtccagtgtgtgatagtaagtggcgatactttgacgctgatgctttgatgacagcaccgtctggggcaagattgcctcgcagaacagccaaggatgacgcgggaaacaaagggtctgacattggccgaattatctgttgcgcaaaggaaagtcccttggactgggatgcatcgaggacctcgcccagcgtttgcccagtaattgtcacagcagataaatggagcaggggtcgaagcacttgtaacagcgccatcatgcctcctgcattgtggaaatcattcatataattatctccactcggtttgagatcaatcaacagtggggttttgcggccaatttcctcaatagtgtctagagtgatgactccctgcagttctggatgtctatttgcaatagcgagcagatgaacaatggcatttgtcgaacccccgatagcctggagcactgtgatggcattccagaatgattcctttgtcaatatttcttgtggctttctcttggccttggcaatcacaactgcatttgcgccggtctcttcggcaattcgcagtctcgcagatgatactgctggtgcagttgcgccccgaagcggcatcattcctaatgccgcagtcacacaagccattgtactagcagttcccatgacaccgcatgtccctatctgagcgagcgatgattgtaattagtgaactgaccttggaaatgaccgtgtatctgataagagcgcatctgcacataccgtcggagcaagctcttcgttaatggccgagatttcctcgacgtccatttcacccgctcgaaaagctgcccaattgtttcggcaatcagtgcaggctccaatacgctggccgcggtggctccctggcagcattggaccggtgataagtggtaggattggcttgttggctgagataccacccattaactgagcaggaatagttttatcacaccctaaattctgtcagtggctattctcaatactaaaaaaacgattggaactcacctccgatcattatacaagcatccaatggctgggcccggatcatctcctccgtatccatgctcataagattccgcaagaacatgcttgttggatgcgagaatgattcagccacactgatggtagggaattctatcgccagtcctccattgagttgcacgccgcgcttagcagcctcaatgagctggggcacattggcatgacagggattgaaccccgagaaagtgttgataatgcccacgattgggcgtgaaagcgcatcttctgaatagccaagtgccttgataaagactttgcggagaaagagagagaaatgaggatctccataggatgttagaccctgtcgaagtccagatgtggaagtgattgggtttgtgagatcgtagtccctattggaatcctgttcgtccattttattgtatttccttctgaatagcaattccacagaggactatcgaggaagtatagacacctgagttaggcgacttacatattcccctcctctcagtggatggtgtcatcggaacaagcccgattcggatattaatccgggccgagggggttgtacatagaattaaatttataagatctctctctctatgataaaacgctatgcaatacttccatgtaatctataccctcaacttcatcctcacccgcagctccttggtcggtcggaaagctccccagctagtcttgtgtcctggaactgagaggattttaccacttgtgggctcaatatcccataaggccacaatgccagcagtaaaagttaaaacagctcgctcgatgaggccattgttcgtcgatccatacaatccgtccgcaaagggagcaatgatgctttgatcagcccgttgttttcccgttgcaggatcagttacgagaaatcgtaggggatcatactgctctggatttgagaagtatcgagcatcatggtaatatgcaccatggggaacaatgatatcctcgccctttgcaatcttgtacgtacggagctccgtcaggccataggccgcttcttctgccgactcggaaagggtcacatcggacgccagcttcttgaacgagattcctgctgaatgaaggcgcacagtctcatagtaacatgctttcaacagcggacaagatgtaagcactttttcaatatccagagagagacgaggaggctcatcaaaggggaaacccgtctcctcgcgagttagcctggaagccatcacgtaagaagcaatctctttgcggacttgctcgagaagtgaaggttccgcaaagagatgggtaattgtccaaaaagtgatcttggtcgtgtgttcaatcagatcataatacagagacaagtgccctgcagcactggcacctggagatagctccaatttgcggaaagtccgcattctgtctttgaccaattcagagacatcgtcaagatcacgcagttcaatgccggggtcaatcccatcgtcccaagcagtcaaagctcggtgaaagactgaaaagatatggtgaagccgatcactagccgcatgtcctgctgaggctgctgggtgcggggcccatcgaggagtgccgacgaacaatgtcacaaagcaatcgtcaagtcttccaaggtcttctgagagattagggaaattctccacgaatgtcccacccatcaggaaagtagaagtgatgtgtccaatgaaattgctcacgagtgcaaacaaattggcttcacagactgtctggtccccttcatcgggcatctcaactccactgattccacgttcccaggggcattggtcaacaatgctccggcagaagcttaccaaattcggcatgtcacgctgcaccaaacgggtaatagtagacgaagcttcagtgacaaaagcctcttcattgagaatggtagtagccttgtcgctaagttcttggttacgatccaaatccagattgcggatgaggctgcggtcgccaaagacgttttgcagagcttgatcgagcacctggttgcgtggcgtggcagttttgacagagaaaacagtcttcatcatagatggagaagccacaacattgtacttgacaccgcgaatgtaaatgccaaagacaggctcattcatagactccctataatcctattaacagacgtctaggatggtaatatagtggaagaccaaccgagttcttgtaaagaaggtaacatgattccataagaaggcagggccatgtccaatccagggaaaccaataaggtgctagtcgcaccgtctgtgattttgaagggtcttgctcacgtcgacttcgaagccccgagataatacgggttgtgaggcatacgaacaccacaacagcaaaaaccgttgaccaacttataccgaaatatttctcacggacagtctgtataagactcaaggcttcgtacctctccattgtgattcgatgttgcccaaaccaaacactgccgagcaaggtagcacggttctacagcgccagcacccactcaagggctcgaggtagacaaagaggtatgaccggcaagtttggattgattcactccagagatttttatttaatatatccaggtgaagggtgaagggacacgatggcaaacggaggccggggcctttttctggcttactaagctcgagggtctcagctgggttctatttttgttggttttcatttgaatgtcaacattttcaaaatatattatgatttcgttctatataatgataggtgattctcagataataatagtcggatcaaagttgatatcacttggttcgcgtttatacttcgccgagaccgctaatagatctatatctaaataggagtccaaagaaaggactggatttagtactttttgtagtaacggagtaagattgagacgagatttatagacagtagctaaaagcttaatattccttctgcaaagactttgacaaggcagcactttcactctcatacttgagaatcttcgattgcgatccgtgaactttgcgcagaagccactcgatccgcgacgttagctcccaggggtactttggcagtgagccaaggacctgcagctcctgctcatacttcgtgatacttgaattctcgttgttaatgagctgtgagaggattaacaggtcaaggcggccctgcagggtcttgttctcaaccagacgttggaaagcagcgcgatacacgggtttgcccggtttgacgtatcgtgggaatcctttgtcagtcccgatggagacaagctctgcttgctctagtgcccggagagtgacctcgccgttgtccttgaatacatcgtcgaggaggactttgttgtacaacaggtttccatccttggagtgggcgatagacttgatcagatgccacgcctgctcacgggaccactggagtgtaattgactctgttccgaggatgaagagcttcaggatttcagacgccgactgttcaatgatacggtccacggcagctatacaatggttaatagaattctccaggtagaaaaaaagataaacataccttcaggtgtctctccggcctcaattcgatgagccatgaactccaagtcagtaactcgaccacccagcactttgatacaagcatccaagccacgaagcgtctctttgcgccttgcattctgttcatcgtcactatcgtctgcctcggcatccagatgactcaacacgaaacgacgaccaacttcgagcgagcagtcacctaaagcaattgtgcggaacacttggttaggcatggctttgctcaatggctttgcaaacgaggcatcagtcgtcaagaagattacatgggcgatatttgcggatgtcagaccagccgcccattcagtaagtttgtcgagcacgacactatcatcctcgtcatagagaaaattgtcaatcacaacgacaggtctcacctcgggatgagcctccaggtactcatcttcggacatgttgaaatctttgtcctcctttcgtctaccttccaaggcgactcgcttcatagcaacaccagtattctgccagatcttgctcaattgcgcatctagagtctcggagaaaccggctttggtgccgatcattccctgtgcagcaaggtcaatgaagctgctgatactgttcatccaagagaagatcggtcggtagccgacctgagcggctgctcgtgaaatcttggttgtatcaccccgagcatcttgaatttgcttgcagtcaatgatgaccttatacttgtgctctttcagggcttgttccaaaaccaactcgcgtttccctgagccacgaggaccatggataacaataaaggtctccgcggtctccgttagccaggcttgcagttgtgcaatctctgtttgtcggtcttcccagatagctgctagacctcgcgggtctgactttcgcttcccaaatgagaacaggctcgctttgctggcttgtttgcgaacccactgtagcactgggttctcttcactctggaacgacgacttgattttgagagtgatgaagaacgtgcgaattggatcgaagatgatgaccgtgatagtagccaacagagcagctatagcagggatcactagtctcggatggttcaaaatccaatccctgatcataaacagcttgatcttgcgctcgtagttgatcttgaacctcgtaccggacttgccacctcctgcttcttcggaaacaataaatccgtgcatgcagttccttgccatcacggcgtacctagggcgctcgaatctcagaattgcatatcgtggtaggactttcgaatctgagggctgtgtttggatgtccagaattttaccgtaaggtcggaacaatgagtatagggactcttgggtcagttcggccgctgatttatctggcgacgttggtaagaactccacctttagggtctggcttgggattcgatagagatcttcgatccaaggcgttccgcgaacaaggtctgcatcgactttcaggaacggattgaaccagggcttaactggattggttttcaaatgctctttgattgcattttcgatactttcgtggctgatgtccgacttgagtgcatacttcacgaatgcgcctccctctttgtacctcgtcacgacctctttgatctccagatttaaatttgtgggcaaaactcgatgaacaatccgagtcgggtcggctgccgctagttctgggttgttgactcgtgccaaaagtccctcaagaggctgaatatggctgaggggtcccctcagcagccattgtagtcggtgcggaaatatatctagggctagttagtggatagacatgatagcttgcaattagtcggcgctcactattgacgtagataatcccttcgttttgtcctactgtaatatgtcccgacctgatagaagatgtgcatcgtatcatcgagcgtccccaaaccggaggtctccacccgcaggacgcattggcgctgatatgagagcgtgtgggagaccaaaaggccaacggacctttttgtaaaggtgtcggtctcattatggtcacagacacataccgaatagagagagaaagaaagaacttaggagagcgatcaagttgtgtttgtcaaattaatgacgtcggttcgtgattatcggagtgtgattatcggagtcacatgacaatattgattaccgcgaaaaagataacctcgcgatttcatggatcgcgatagatcgaccaattctttctttcacaaaacgaaatgggctggctgtggagctcaactcctaaggatcttccgaaggatgttcccaaggatattccatccacaattcctacggaatcagtaaagcagaatgcaccatcgaagaccttgacccccgacgaacaagccgacttggaattcagccaaatcctggccgatctcagagccgaggattcatcgctctcaaaacgaacagggctgactcctgatggcaatccgctgccagaatcccaaacaccttcatcgcccatttctcccgagtccctctaccaagatactatgtcctgccgcaatgccttcgactacgccttcttctgtcagtccttcggaggccaatttgtgaatgtttatcgatatggagaattacggtcatgcagcgatcactgggataatctatggctgtgcatgaagacacgaacttggccagacgatttgcgcaggagagaaatccgggaccacaaccgaaagaaagcgattaagtacaagacgggccccagcagtgaagatgtctgggatgtgcgtctagacccagccaaggactcgttcaagggagattttgctaccatgtggcaggagatgaaggctgaagatgaagcagcaaaacaacaggcgcaacagacggcttcatgatgtcccctgtttctcttctctccttgttacgatatgtagatatactcccttttgtttcattccctcatgtataatatgatactctccatttcctttgtgtatcggcgtttgttcgatggtcatatggaggacccggcggatccgcatatagcgatttagaggctttttgttacactgtatgatcttatattctcagatttgtcaatctgtctgtacgtggattctataagtctgccccacggcctataaaactctattgaagggagagaataatgctggagaaatagttgattggcgcaaaacgctcgaagagatgcttgaagaacgccgcataaacgaatgacctaaaattagaaaaaagacccccaaggccgtagacacaagagacatatctcaggatatcaataagaaaaccctaaaacatacttacctcatattatttcatagcatcgccgtgcgtctaagagctcagctgcgaagcaagcttgtaagacttattgctaagaacaattcaataagttagtatgtagcaattcaatggaggacatgtaaccaagatgatgttctccaattctctaattactcaatccaaacttcattctttcattgctcttcatcttcctcctttatcgactgcagtcgtgtcttgatgtgcttttttaatcgatcttcgatttccgctatcctagcattcacagaactgttgctgcctgtgctgcatgtagaggaggccacactagctgtaggtgaaggagtgaatcttcgcagagtcacaatctcaatccccggaccggcatcgaagttcaacttcttgctgagtctctttaccttggggctagtgggatggtcaacggtgagcttggccatagcagcagtgatatcagcaatatcagatggattgaatacaataggggtagatcgacctcccgaatccctggagtgataggtaagaggcctggaacgatttccggtccttgtggaattcttgcgcatcgttgttcggaggctaccttcgacactcctaccgcgcccggatactcgaccatcgttatagtggcggatggaccgtcgctcaccgtcgagctcgcggtcagtgatgaagccgtttggattgagatcactcgcggcctcggttgtcttcttggcttcgttgtccatgtttgcaatggataggacctgtgaatctgtaaaataggtaagctggattagctaaaacgaatgaatggaatggaatggtccgagaaagcaagggatatgaggacgattatatagttgagccatcaatgccggccatgcaaatctgacaaagggaagttaccaaaggaataagtacaaagacgttgttgactcttcagctctttgttctttcacacaaaagacatagagagcatctagctttagagactaatttcaagtaataatggaacatggtcagatttgcagaaaagctatgtacagcagaaatagagatcaccgaatggcagacgctctaaacgccttgcagacctagaaaagaagagaaagaaggagaaacccgctgaagcaaaaactaaagatagaaagaaaaaagtagaaaagtagaaaagcaaaaactgaagaaagcgcagtactgaagccttttccattcgcgcagagaaccaaccccataaatcccgtttatgccacaaatttatcccatttgatgaacttttccgcatcaaaatgaaacttttatcgtgataatggccgtcaaagtcgtaaacatgtcctgcatcgccgctagattaagcagcaacctcagtgggttggggaacggagtcgatggcaggacgacggacgataccaccggtgactgggagctgagaactggttccaatgaggaaagcgtccacttcgcgagcacactggcgaccttcgttgatacccctggaattatattagtaaattgctagttataggaattcgaggaaaactcaccagacaatcagagactgtccacggcgacagtcacctgccgcatagacaccgggaaggttggtcgagtagtagccgggaggagtcttgatgttcttgcgagggtcaagctcaatctcatcaccaaagacacgatcctcggggcccaagaatcccatagagaggagcacaaggtcagcggggaagaattgctcgctgccctcgacggtcttcatgtcccagccgccggtagcgctcttggtccactcaactcggacagtgttgatacccttgacgtggttgttgccatcgtccacgaactcggtcgacatgacacagtactcacgtgggtccttgcccatgtgtgtcttgacctcggtgtgaccatagtcgacacggtagatacggggccactgaggccagggattgtcacgggcacgctctgggggaggctgaggcaacaactcgaagttggtcaccgacttggcaccatgacggacagaggtaccaatacaatcgttgccggtgtcaccaccaccaatgacgacgacatgcttgtccttggcagagatgtattcgccatccgaaagaccagagtcgaggagggacttggtgttcttatgcaagaactgcatggcgaagtgcacaccatccaattcacgaccagtgaccttgagatcacgcgcaacggttgcaccagtggcaacaatgacagcatcattagtggcacggagagactgcagagaaacctcgcaatcagggccaacagcagtgctcgcaacgaacttgataccttcagcggccatgaggtcgatacggcgctggacaaccttcttgtcaagcttcatattggggatgccatacatgagaagaccacccattcggtcggcacgctcataaacggtgacgctgtgaccagcgcgattgagctgatcagcagcagccaagccagcaggtccagagccgatgatagcaacggtcttgccagaacgggtcttgggggggcggggaaccatccagcccatctcgaatccacggtcaatgatcgcgcactcgatggatttgataccgacggggtcttcgttgatacctagaacacaggagccttcgcagggtgcagggcagacacggccggtgaactcggggaagttgttagtcatcagcagacggttcaaagcatcctgccactgcgccctaaagaccagctcgttccacttaggaatgatgttggaaatggggcagccagtgtcagactggcacaatggaacaccacagtccatacaacgggcagactggtacttgagctcgtcctcgctgagacggtgggagatctcgccccagtcgcgagtacgggttgttgcgttgcgatacttctcactgcggcggctgtacttcatgaaacctcttgtcttgtccaagatcaacgctgatcgctttttatcggtcttggaatcgctaatgctgtcttcaatgtctagcaagtcagtcttcttggagtcgtcggtcttggcctgttcggttttgaccggggtgttaggaagctggggaagagtgaattcggccttcttcgcagcctctgccttggcagcttcttcctccatgacgcgcttgtagtcggttggcagaaccttgacgaagtgggggagagcacgagtaaagtcgagcaggatgcgagcagccagctcggagccagtgtaatggtggtggtcttcaaccaagccacgaacaaaggcaatctccgatgggtcttcgatactggagatctcaaccatctccaagttgaccttggaatggaagtcctggttcttatccagaacgtaggcaataccaccagacataccagcagcaaagttgcggccagtaggtccgagattgagtacacgaccaccggtcatgtactcacatccgtggtcaccaacaccctcaacgacgacagtagcaccggagttacggacagcaaaacgctcggcagccataccacggaagtagcaagttccacgggtggcaccgtagagacaggtgttaccgacgatgacgttttcttcggccttgaaagcggctccgcgcggggggtagacgatgagacgaccaccagagaggcccttaccgacatagtcgttggcatcaccttcgagctcaagggtaacaccgggggcgaggaaggcaccaaaagactgaccagcagagcccttgatgttcgcgtggatagtatcctgaggaagaccagcttcgccatagcgtcggctgatctgataggaaagagtagcacccaaagcacggtcggtgtttacgatatcacattcaattcggcagggtagacccttctcgagagcgagctccgattcggcaatcagcttgttgtctaagcgagtgtgaaggcggtgatcctgcttgcggacattgtaggtagcgactccagggcgcagtgagtgagcgggggtcaggatgagtgacagatcaattcgttcctgcttggcattacgaatatcgtcccggaccttaagcagctcagcacgaccgaccatctcgttgaccgaacggacacccagcttggccatgatagcgcgcatctcgttggcgacatagtagaagaagttgataacatgctccggtgtacccttgaatttctgcctcagttcggggtcctgggtcgcaataccaacagggcaggtgttcaggtgacatttctagaaatattgttgttaataggccgttcgtcaggaaatcagggtactggatgtactaactctcatcataatgcatcccaatgcgatcaaaggagttgtggcaaacccatattcttccgctccaagcagacaggcgatggcaaggtcacggcccgtacggatttggccatcggtctgaaccacaacacggccgcgaagatcgttcaaaaccagagtttgatggggctctgcggggacccaattccccatattcttccgctccaagcagacaggcgatggcaaggtcacggcccgtacggatttggccatcggtctgaaccacaacacggccgcgaagatcgttcaaaaccagagtttgatgggtctctgcgagacccaattcccaaggaagaccggcatacttgataccggtccagcgcgaggcaccagtgccaccatcatgaccagagatcaagatgtgatcagccttggccttggccacaccagaggcgacaataccaacaccaacctcagatacgagcttgacggagacacgagctcgggggttagagcacttgagatcgtagataagctgcttcagatcttcaatggagtaaatgtcgtgatgcgggggcggggagataagaccaactcccggtgtggagaaccgagtgcgagcaatggggccaacgaccttgtggccgggtaattcaccaccctcaccgggcttggcaccctgggccatcttgatttgcagctcgtcagcgtcggctagatagttggatgtcacaccgaaacgaccagaagcaatctgcttgatagcggaccgcatcgtgtcgccgttctccattctcttgctacgctcggcatcttcaccaccctcgccagtgttggacttgccacccaagcggttcatggcaatggcaatcgtagagtgggattccatggagatggatccgtaggacatagcaccggtcacgaagcggcggacaatttcggtccaaggctcgacctggtcaattggaataggcgtacgctggtcgaaatcgaagtccaacattccacgtaaagtacagttcttaatctgctcatgtgcggacttggcgtaggcctcgtaggacttgtcgttcttggtgcgaacggcatcctgcacgttggcaatgctggtggggtcgttgatatgggcctctcctccatcacgccagtggtactcgccggattcaggcagaccggggacttcgacaatggggtgcgaagggtacccgcgctcgtggaaggcgaaagcatcctgggcgatcagatcaaatgtgataccacggatacgactagcagtaccagagaagcagcgatcgataacgctgtcgtcgatgccaagggcttcgaaaatctgagcacccttgtaggactggagagtagagatacccatcttactcatgaccttgaggataccaccatcacaggatgacttgtagttctgaataaccttctcatcggagatgtccttgcggatcaagttctcccggttcatcttgagaatacattctagagccaggtaagggttgatggcatcggcaccgtatcctaacagaacacaatggtgatggacctcgcgagcctcggcagtttcaactgccagggcggcaagtgatctccacttatttcggacgagatggtggtgcaccaggccggtagccaacaaagcagagactgcaacacggtcggcggatgtagcacggtctgagagaatgatgagcttgtcgccattctggatagcttcagtggcactgtcacagatggaatcgagcgcttcaatgtaaccagcggtgcccttgctcttctcgaatgtaatatcgatggttcgcacagtccaatcgttgtgggctatgttgacattcttcagagcattgaactcgggaatgctcaagatgggagagggaagacgcaaacggtgacattgcgacggatccatttccagcaggtttccctgggggccgacgtaacattcaagggacataaccacagcctctctgatggggtcaatgggagggttggtgacctgagcgaagagctggcggaaatactcgtagagtaggcgaggctgctgggcgatacaagcgaggggtgcatcattacccatagagcccagcgcttccttggagtctgcggccatagggccaagaatcaagctgacttgttcaaaagagaacccgaacgctcggaggcgagggtcgttctgaatggtgttgtcgtccaaggcaaaagaaagatcaacgttggagtcaagtagcacctgattgatagcaggaagcttcaaaagtcccttgtccaaccagccggcgaagtcctggcggcgggcaacagtctgcttgagctcggcgtcatcaatgatccgcccggccacggtatcaacgagcagcatctttccaggctgcaagcgacccttttggacgactctctcaggatcaatctcaatagcaccaacctcggaagcacagacgatgcggtcatcgtccatgacgtagaaacggcagggacggagaccattacggtccagattagcaccgcagtagcgtccatcggagaaagtgaaaagagccgggccatcccaaggttccatctgacaagcggcccactcgtagaaagcagacttggctggatccatagctgggttgtcctgccaggcctcggggatcataatcatcactgcctcggggagagacaaaacgccgttgatcatgagtagttcaagcacattatcgaacgcagccgagtcagaaccaccatcctcaacgatggggtagagcttgtccagctcgtcaccgaagacctctgaccgaaggacaccctcccgtgcgcgcatccagtttttatttcctcgcagggtgttgatctcaccgttatgggcagcccatcgtaggggttgggcacgatcccaggatgggaaggtgtttgtcgagaaccgagagtgcactagggcaaaatggccctcgtagtctacgttcactagatcgtgatagtacgtgtacacttgaacgggggagagttgacctttgtagacgatgttccggttgctgagagagcagaggtagaaccagtttccgaggccgatgacatgagtggcacgcttccgtagaacgaacagctgaagctcaaacgttctctcgtcgaatttttcagtgtcggtgatctccggcttgttgccttcgccatatgccgatttcaagaccacaaatggctgcataatgataggctctcgagatagtgcggcaggaccaagaatggttgaatcccgtggtacttcacgccatccaagaactcgcaagccaagggacgtggccagttcctcaaagtccgcaatggattgcttgagggcctcctcatcgggcttgaagaacaagttgccgacagcatattgtcccaacggggggagatcgacacccacctcacgggcgaagttcttaatgaagaacttgtgtggaatactagtcatcacaccagcaccgtcaccatcccgtgcatcagagccaacggctcctcggtgggtcatgttgcacagcagattgcgggctgttcaattgctgtcagcttgatgtcttctcacgttgaacgcaaagagcagaacgctggcactcaccatcgctaacaatcttgtggcttgccttgcccttgatatgactgatttgtcggtcagaattgattttggtccacatgcctccaattgggcccagttgtaggggagatcaactcacgctgcgaagcctacaccacaggcatccttctcatattcagggtcgtacagaccttgccgctctggtagagcattggcccagccaaaaccctttttgggttggtactgagaatactcatgaggagcctgttcttcacttatatctttgccatagagctcctccaagttaagacccattcttccgccgggagccgacagagaatggaatggtaactgaaggggactgtttttttgtttttagaaagaccccaccgatttggggattgaaagctggtgatgtcgtcacagggtatcgcagggtgggtgagggaggagtaaacgcgtcaatggtcacccagcttctgcgagagagttgaagatagaagaaggggggaaggtgagaagagaacctgagaaaaaaaaaaggagggggagagggaaaaaaagatgggcgattacggcgggacagtaggtccggggattgcaggccccgatgtacccaaaagggaaaattacaatggtggggagttctaccgtggcaaattgctaggtgaaagcagccaagagaatggcaaggaggttaagtgaaagagatatgagaacagtcaaacctgctacatgctacatgctcgatgctatataatacaacatgccatttagaagctcttcactgtgaacagacattttcgatataagagaagtcgagcaccgacggaaacagcccagagagccagcgtattgataatcattatgattacggagtgcaaatcatcccaagataagcatcgctcgaccaatcagaatgaagattttacgatctagggttagctctttactacgtcaactaactttacgggggtgtcactatatatgaggatatcagatttatacatctgctactccttcttctcgattcctagatccaattcatgtccacttcactttcctctttctcgattctcttcaaagctcacaaaacaaggtctagtgggccgggcggccccataggcccataggcccatagacccataaaaagctcagaggcgttcattggatatatacatacaaagtgtacggagtacggagtacatactcccgtccccgaaatagggcaaatcttcacatgtgagagagagacccgggtgaatgggcgcactcctcagtggggcaaaaatgtagtgcttaatccattcggttttgaaccggtttgcatttagtctgcatatctgcagggaacctggaaaggtactagagaagtaccagtaaaggtacagatctaaataagagatctcaaaaggaaaggataattgcagatgtatcgagtatggagtacagtatacatagtaaattgtttgacatcttaatgaaatgcataaatacctgtaacggtactccatactccgtacacattccgacaacggccaagtccccctgtcccgagtttcccctctctatcactttcttggccttgtacggaggagatgccagatagcccgatttcggggccctgaaccgtttgcgggttgccctctccccctcgttctttaggccactcagactggtacttaccggatatccaaataccagcccatttactgagaatgcctatgattccccattttttacattgtataacgtggacgagacagagtccggagggaaagtcatccagacatgtgaagacctagagataaggtagatgatgataataagaatacataacttttctctgcggatatcttctccccttttcgcctatctacatcgcatattgcccgctactataagtatcccgtacggagtactccgtactgtatctcaatatgaatcgggtgaaacaggatcttgtttatacttcacacacaccaattatagttaccgtattatttcaatcaccataccccggaaccagagagtggagattacatgatccccgccttttctagaccaatcagcgttgagataaaagtcagacacatccaacgtcatgatttcgggggaggctagtgtccatccggctttttccggatatcctcttgtccactttaggttcaccgggttgaccgctggcatcgggtgattccggatatatagatattcaccacctcaccactagatcttgccacttggtgagtcagtttgggattctcatggtgtacaactcgagaactagaactttctactcaggtagttattcggccgaaactgcgcatatatattgtatgtagtgtaagattgatgaaaggccaacatgaactatattttgcccttgggactgaaactaaacatacacttggtggttttgattatatccatccaatatagactattgttaagagcgatgaatattttcagtgttaataggagacagatatactactagaatatgattaacctcaaattgccaaatagtctgtgtatatatatacacggagtatactgcctatatatctgacgatctatatgtatgctgtagtaagttgtatatactccgtagggttgacggatcccccgcatagacgaattgattggcggtggagctccggcttttttttgcgttcgcgctttctccgaccttgcattatatcgtacgcctatattgacatctgcaattgttcttctctatagttatcctcttctttccaacataatccgatttcacatgcgtcccgaagtcctagcaacagtgggcctagcaacagttgcaactccattcgccacaacataaacaaacggctacaaagcactgtatctccaagtcgcaagacatccccgcaaagctctataagcagatacctcaaaataggcagagtattcgcaaatctagccttgaaacagcaattattgcagcgatgctcaccctttcgtccatcaccccgcgcgacgtaagtgccaggctctgccgattcaagcttctcaatcagccccggaggaaactaacaacttgatagtcccatgaactttggttcggatcttcccagccatatcgctccacctccgatcaacaggctggcgacaactccgctgccaaccatctcgcccgacgcaatgctggcggcacgtccagcagtaatcgctcattcatgccatcccgctctcctgccaacacaatcgccacactggccgcggaagaacgctcgctacgcgctcgaaaattgaacatcgcgtcgttcgggtactcgtggatcaggccggcggggtgcgccaagaccatgctcgggatgaaagaggaggaagcagagcgggaagaggcactacaggctgctgcggcggagttggaagctgcagagggagaaggcatcatggatgatgacacggggttacagagaggggaaataggggaggaggaaggcatggagcgcgatttggatgacgatatccccaacgcggaggaggaggcctcgggtcttatcgaagaaggcgaagaagggcttgaggaagatgacattggtgacgaaggggaatacatggagcgcgacttggatgatgacatccctgaaggcttccccgatgacgactatgagggctcaggcctgtatgatgatgacgacgaagaggacgatttcgacaaccagcctgatttagatgcggacatacctactgccgacggtgagagtgtgagcgaaggcatgacgcgcgacctcgacgatgatatccctgatgcggcagagcaaggctcggagcaagaaggggaatggcagcacacagacagcgaagaagagctgagtgatggagaggaaaacgaaaccagtattattcaaaccaggtttcccgagaacttccgcaccagtacgccaaacactcgtggtttgcctccacctccgactctgcgccgcgagcccgagactgaagcccagcgccgtttcctcaatcgctggagcggtggtggcgatgcgtttgattctagcagcatgctctacagcgacgaagagctacgcgcatccataaccagtcagggtagtcgacgaagcgggtttgcgagaaggttcccgcggcacatcggtgggcctagggatagtctgaactaaagacatccattataatggtatacttgttatgttcctctgcggcgttttgtgtcagcgtaaaaggatagatcttggggggtctatctcggagttttggtggcaacttatgatacctccttgtaacataatatattatatgagcaagttcaatgaacgtggcttcaaacgcattgtgaatatccacagtcctggaaagtaaggctcaacacgtagaatggtttgttatgttaaggcagtccctgtatattgttttatatgcattatgtacgggttacttgaaacatcttccaatatcaaagccatgacctctcctgaattatctccagagatgaaaaccagacaggtcccaacttgttgacttgaaagcggtatgtaagccaatggcagggttttgcattattgcatatacatagctcaaagaatccatagtcccaaaacacctcatagcgccaaagccaaggtttccatgctgaagaaattgaaaagtcatgtgcgtgactcgattaagatcaagtaaagagcaagtcgctgggttttccgtgaagtaagacgagagattaaagatgataaagacaagaaagtcgggcgtgatcgacatggtatagagcgcgagtgcagtcttagaaagacagcaagggtatacgttcagaatatccacacatagaagaacaagaggaagacagcgaaaaagaagccgagccagactcgccagccgatgccggtgctctcggccatgcgaagcatgcggttcatattcccccgcagtcggactcgggtgttatcaaatgaatcgttgaggtcggtgatatgtgtggtgtctcggatttcatcgccaattgcaagtgtgatctagatggttttcttgtcagcggtttgttatttcaaactactaactgccctagttgggtctggaagtatgggtgcgaggcttcttacatccttcaacattttgaccttggcactaatgccctcaacttcggcgtcattttgtgactcaagagatgagagaactgcatcggagtaatgtcccctatatcaaagccttggttaacaactatacatgaaagaacgacgggcgatcttaaaagatcatgagccattcaacgcactttttgtcgggcgatgcgctttgatatccacctccagctgcaccgctactcgcataaccattaagtgctggactggggtagcctccgtacccgtatccacctggttgttgggcaggcgatctgctagcttggcgtgagtcgccaccgtattgatcaaaaagagacgaagaggggcggggatcacgttgacgcggaaagctattcagattaatgctgcattagccgactgaaggacacctcataacgaacggagggagaaacgtaccgtgaagccatgacggtcgtggagtgtagctagagttcgcgatagagcaagaggaggaacatggattgcagatcgataagctcttcaacggcaatcgagcatctcgcaagggtcaaacgcaagtctatcactgttcgagtcctcgatgtttgatgcttgcggagataaaaacatcaaagtggccatagcgttatcattcgctgaacagcacgtgatagcccaagtactggaaaccgacacgcgggatacacagcagatgtggttcgcatgggcatctgctattgtttatctggtcatttaggattgattatggaatgaaacgggcaaagcattgctcattctaagctatgccttggagatatccatttggtctacaagttacatcataggttaaaaatgggccaacccgtagtcaatggattaagtgtatattaacggggttggaaaattttttttccgaagagatattcattgattcattgtcatcacagaatcgcgagacatgttttggacacacgggaaaaaaacatcgtggaccgacccgtggcgcctatcgttcaaagcaattccatgccacccggaagttttgtattcatcgagcttagtcgcgcatctgatcatcatcgttggtctgggtgtcctcgcggacctcgtattcctcatcgtcatcctcgtcgtcctccatctcgtcggtggagatcttggagtagtcaatgaccttgccgcgtgtgcgtcggccaccctggatgatgttgctctggtcgatggggtcgttgagattgtcttgtgtgtcatcctcttcatctacagtataggaacagaaagggtcagtatggaggcaattggtggccgttcaggcgcatgtggtcattcagacatgggttgcttgggtgacagtggggtacacataccattgtcggcctggtcacacgcaaggaagtcagcataaaagaagcaattgcgcgtagaaattggagactcacaatctcgttctcgctctcagactcgctctcctcgtccatgctcatatcttgggtggggtcagccttgcccttgcccttggcaaaggcctcgtcgttggagttggaaatagtcgcctggtcagacataatgaggtttattcagggggtggatggagaattgtaggaaggatggttggtggaaagggacaaggggaatttaaaagacggtctgcaaagtaaggtctttccccctcgaaccaaaacaagctgcaagggcgctctcgccgtctgattggcggtcgcgggtgatcaaaccccgtgacaaatcctgccctgaggcatcaagtacaagtaccaatagaaagaggaactgaaagagcaaagtaagtaaactattggaaatacctacataacaaaatagacatatctaacttgttgatatgggcaagcgatagtcccaggctatcgacaatattacatactagaacgcttctttgtctgcatttgtgaaccatgaagaggcaaatttcatattagaacttatgatatcagctattcttctgtcaattacgaaagtaaatcagctgtccagagcaaagcatctttccacagacgttgcattattgccccaccattttggcatcgagacttgcttccccgctccgaaaaagaagaagacgagcaacatgttgaggttgaatccagcatcaaatgcagcagcaatcaggtagttgtatcgcttccagacctcgaaatggcgacggtaagcccaatacattacgatatatccaccaataatggcagatgtgtaaccagtactgatgttaccgtagaacatcgccaatcccccaaaaaagatactgacgttccacaagtcaattcgaagccgggggaagaagcggtgaaaacagaagagaataggaggaatcaccgcccctacaaggaatgaccagggaagcacggtcatttccgtctcagcgaaaagcctctttggaccaagtacagcgtattgaactcccattgtgttggaagtccgcagggactgtcctgtccattgattcagtggatccgtttttttgccagtcaaataatctcctttggtgtccatgatccaacgcatgacggcatagttgatcggaacacccatacaagtgccgaaaatttgcgagaagaaaaccgcgcggggtggaatgtgcatgtagtggccaatcttttggtcctggagcatatactgtgcacgataccaggcgtcacctgcaatagctccatagaccgaaggaccacaggggtgttggtgagccttgccggcttttgtatgaaccatgtagccatacatgagttcattgaatgagccggtctcaagttggtaattggaaatggcgtaaagccaagcaaaggggatgaccagaatggcagcactcgaaagtgtcacaaacaacgtccaaattgggatgaatagatgacccagtgcgaagaatataatcagaatcacaaaagctaccgaaaatagaataccataccaccaccatggaatctctttgtattgtctctggataacattgagacggtcgtgatactggtgatggatgctgtcgttcttcgtggatttctctgcgttgcgggatgaccagattcttcggatattcccggaaatctgtgcgtatccaaaggtcaagatccaagtgaccgctgctggaagtttcgcgtagtcgaagaacgtcgcccacacattttgcaagcccatatacatcggcccatactcctcgtaagcggtcacgttcagatgatagtctggggtgagtacgtccagggttgggtattctgtaccgttgcttaggaaaaggttgtttgacatgagtccatgcttgaaggaacctagattcccccacttcgctgcaggaagtaggacccaacaattgaaagcaaatgccaagaacaagatgacctgtgtccagtatggggtcgtcatgattgaggatccattccaatttacattggaccaatctaacgagagattaaggaagcccatgccaccaattcctgagccgataaagttggccaccggattgcgaggtgccacccagcagaggaaggccagagatgatgtgaatgggaaaacatactctggaaggaattgccacatggtcatccccagaagcgcgaagaagaaaaccttcatctggcgccgagcgagagcagaggagttgtctgttttgcgaaaagtttcaaacaatgtggtttgcatcaaagcttggggccagatgtattccgggtcaggcaaaaggagttgtcgggcaagcgcagcaaaggagtaaccaatccacacaattgaaagcatgaagaagattgcaaccgccggattgattcgtgtaccgtaccaaagctctgcgagcacgatgggggcgtatcctagattgtacgtagccccagatgctgcagtcaatgtgaccaggacatgctccttgatgctccatggggccggattcaggctaaaagaaaagcgagtaccaggtagaccgatcctccagtcaggaaggactctggccataaagtgcccggcatagtgacaggcgatttgaacaaagaagatggagtatggtgccgtggtagtgcggaagtgactcatctgcgacagaaaggcacccggaacaacaaagatgatggcgagcacaaagtaacggaaggtaattgtcggtaagctggggtcgtcggtcaaattgatcagatgtctcacgggcaagggcaatgcagcaatctcgggattatcgtgtatttcttgctcaatggcggctgtttctcccttgaaatggaggttctcttcgtctaccgcagtctctgccacctttgggtctttagagaactcggagccttctgagcccataatctcttgttctatttcgacctcggtgggggtttcctcgagtctcttacgcttcagtgcagcgaacatgtttaagaagatttccgatagcccatggaatatattttgcatgaagttatttaaataaaatagctcatgttgtgcgactggagtaaatattcgcaattcccatagagaaatgccccattggacgagtccaggctaatgccatcacatcgttacagctacaggggtgcggacaaatgcttagcgcggatggcgcaagccaaaagctttttttttttttaggcttaaaaagaataagaaataagagggaaaatagggaaaatagggctaaccagtctcttgtttagattttgtagatgatactccgtatatctagaatatatatatatacttggcaggggaattatagggttgttccaaggttcgttactggtatgaaatgaagtatataattgctacgcttcgctccgcaataagaacaacatagattggatgaaatagtttttatacatagattctgggctatattatttgaatgataatatattaggttctgtgagtgagatcaaaagaaataactagacaacatacaacacagtcttcgagttagttaggaagttcacctcgacatgttgagatcgacattttagagaattcaggttctgcctcaggctgcaaggggcgtacagattacgtcagccccacttgtgcactgaccaccggttggtcatatgaccgccgagtcgtacgttctgatttctgcccggattccccgcccggaccggagaaaccccggccgaagtcagctggaaaactctggtcgaacggggtgggggaagtggtcgggtcatgaattcactatgacgcatacataattgacagtaccagtaccaataataccggcacgagatggccaccacacagagaataccaggcggtccctatggcgacgtgtatgcaggctgtatcataccacaataccacactctgacaccttggaagtcagcccaccattacatcatacagccccgccataaagaaagctgagaacggcaaagaaaacccatatgaatcagagaggaaaaaaaaaaaaaaggaattgacatcgtcgacgctaaagttagacataatcaagtaatgtagacacctcaagactccactgggctcgtctggaacctactagagtcttaatgaaggacgtaatgaggtggttgttgggccatcgaagctcgtggaatctcatggattcccgtggaaggctccctctagaagcttctggggcaatacaccgctcactatatagcagcttttcgcagccttcaaccctcttctcttctttcctctctcactatcaaatacccttctactctctgtacactatcctcgtcagtgaccagtctctttctatcctttttttctttttaacgattacacacattcaccatggctcccgccgtcggtattgatctgggaaccacctactcctgtgtgggtgtcttccgtgatgaccgcattgaaatcatcgccaacgaccagggtaaccgcaccaccccctccttcgtcggtttcaccgacaccgagcgtctcatcggtgatgccgccaagaaccaagtcgctatgaacccccacaacactgtcttcgatgccaagcgtctcattggtcgtcgcttccaggacgctgaggtccaagccgatatgaagcactggcctttcaaggtcatcgagaaggctaccaagcccgtcatcgaggttgagttcaagggtgaggtcaagcagttcactcctgaggagatctccgccatgatcctcgtcaagatgcgcgagaccgccgaggcttacctcggtggcaccgtcaataacgctgtcattactgtccctgcctacttcaacgactctcagcgtcaggctaccaaggacgccggtctcattgccggtctcaacgtcctccgtatcatcaacgagcccactgccgctgccattgcctacggtcttgacaagaaggtcgagggtgagcgcaacgttctgatcttcgatcttggtggtggtactttcgatgtttctctcctgaccattgaggagggtatcttcgaggttaaggccactgccggtgacacccacttgggtggtgaggacttcgacaaccgtctggtcaaccacttcgtcaacgagttcaagcgcaagcacaagaaggatcttaccaccaacgcccgtgctctccgtcgtctccgcaccgcttgcgagcgtgccaagcgtaccctctcttccgctgcccagacctctattgagatcgactctctcttcgagggtgtcgacttctacacctctatcacccgtgcccgtttcgaggagctctgccaggacctcttccgtggtaccatggagcccgttgagcgcgtcctccgtgacgccaagattgacaagtcctccgttcacgagattgtccttgtcggtggttccacccgtatccccaagatccagaagctcgtctccgacttcttcaacaaggatgccaacaagtccatcaaccccgatgaggccgttgcctacggtgccgccgtccaggccgctatcttgtccggtgaccagtcttccaagtctaccaacgagatcctgcttctcgatgttgcccctctttccctcggtattgagaccgccggtggtgtcatgactcctttgattaagcgcaacaccactattcccaccaagaagtccgagaccttctccacctactctgataaccagcccggtgtcctaatccaggtcttcgagggtgagcgtgcccgcaccaaggacaacaacctcctcggaaagttcgaacttactggcattccccctgccccccgtggtgttccccaggttgaggtcaccttcgatgttgatgccaacggtatcatgaatgtctccgctctcgagaagggtaccggaaagtccaacaagattaccatcaccaacgataagggtcgtctctccaaagaagagatcgagcgcatgctttccgaggctgagaagtacaaggaggaggatgagcttgagtctgcccgtatccaggctaagaacggccttgagtcctacgcctactccctcaagaacaccctttccgagggcaagctccagatcaacgacgatgacaagaagaaggtcgaggacaagatcaacgaggtcatcggctggctcgacagcaaccagaccgccgagaaggaggaatacgagtcccagcagaaggagcttgagagcgttgccaaccccatcatctccgctgcctacggtggccaggctccccctggcgctggtgcccccgagggtgctcgctccgctgacgaggtcgaggagaagcccgaggagcttgactaaatgtttcgctctgaatgacttgcttgtttgccatttggcactcgcttccttttcacgtcttgttttacgaacttatgggttatcaaggtttccttttgcgcatgattgcatagatacaaggttatctctttctagggaaaaaaatcctagtgaatcaattttcttttaataaaaacacaagtctcttgtacattgtagatcatagtattaactaactggtcttgttggacttaggccccattcggacctacctccacacttgcattgaagagtgaaggtatacaggattacatcctcccggaacctcgcgcaagtgatgagagtgaccaatccatacacgacggccagtatatatacatatagaaatacaagattcaaccatcaatattaattctctttgcgaggatctcccaaaccaaaactccaaaccgatgatgtatcaaaatcccgtttaaacatcctggaagtctccgttccaccaccgctgtaaccgatgcccgcccgtttgtacgatgcttccgtatgtgatttccgaagcgcgctcggggtactgctcgcgctggtcacggcggatgcgggtgagggcagcagagacacccatagccagggcgaagaggggatccgcgatcctattcatatagcgttagaatgatatgtctctcttgtcggagacagttggactgtgcggaagtatgtgtacctggagatgaggtagacaggcatgatctgctgagatttgggaaataaggtggtggtttcggtgattcgaggtgttatgtcgtacatctaagagctagaagagaataatcacgtgatgcggacactgcttgatcggttcatggccctccgtcttccacagcaacacacatctccgccatgcatttctcgctctcctctcttctcctgctagggattagcagtctggtgtctgccagctctttgacaattaccattcccgtctctagttccctcccaaacccgcatgtcctccccgcaaccagccatgccactctcaccactctcccctctagtgggaaagaccacatcctgtccgcatcgctgactcgctcggcgacgttcgtgttccatgatcttccatcctccaatccggatgctcagcccgagtcctacttgctcgatatctgctccgctggtggctacgtcttcgccccctaccgcgtcgatgttgcggctgatggatccattctcggaatctgggagacttttcgcgggaacccgtgggataaccgtggtgcggagaaatatgtagtgggtgttactggaaagaagcaagttgacgtggttgtcgaggccaaggtccttggacggaaggtcttctatgagcagcgtgctcaatgtgagcttgcctcctcttccccgcagatacaacctgtaatatttgtccatagctgtgctaactttgtatcgaatcgcagtctctcccttgagtcttgtcaagaacccaatggttttgcttgcagttgtcgcgctgggtctcatgtttgtcatgcccaagctcatggataacagtatgtctattccccattgaccctaatccaatgttgggtgcctaactttgttgtccagtggatcctgagatgcgcgccgaatttgagcagcactctcgctcctcgcccatcaccggtgccactaccagtgccatggctggtggcgggtttgatctggccagttggatggcgggcactggtgcacctaaccccacggccagcgatgtgactcaggctggttcaactggtagagatacgagtggtcctgcccggaggcgtggatagaagatcattgctttattatattgaccgttcttgacatggtatcttgtcattgtcacgtggctaatagtatgatacaaagttcactgaaggtgctcgtggctcataaaaatagagccgaataccgataaatgactagagcgatttaggcgaaacaaaagcaatcctcccaaatccctcccgatgtcaaagcgcctagagtccctcgagatgtacagaggcctgtcccttatgccggagtccatcctagtaacgaaagaagaaaaaagcagagcaatcaaagaaatcgaaacgcagccgagcttagaagtcgtctcctccgaagtcatcaccaccaccataatcatcaccgccaccgccgccgtaatcatcgttatcatgatgatcctccagagcatcggcgatcagcataccgccaagcaaaccaccaccaacacccagagcagcagcaccggcagttcccatacctcctccaccttgcctgcgaggcggttgctgctggtcatatccaccccgctgtgggtatcctccatatccacccccgtatcccggtccgggtccatatgcaggttggccatgctgcggaggatagccaccgccaccgtagtaggcaccagggggaggaccttgctgagcgtacgaggcgtattgttgctgcggccgaggtggcctactgcttgagctcgagctcttgcccatcagcttgctcaaaaacccacccttgctgcgcttctgttcctgctcaggcatcgggctatgcgacgacgctggaactgccgcatatccccctggaccggtggactgcggtcgcgaggtatcgttgtagtagtctgatgaggcgccacgatctcctaatccggccccggttcctcgtgtgtcggcccgggcgtcttcctcggcttggagcttggcggcaagccgtgcgtcttcgtcaatcgtgttagggctagtgttgcctgggccagtatttgttgaagggttataggggttgtttgatcccatgtgtttcttctggtcccccgcactggctattgctgctggatcgcctggcccggcgttgctgtatgatggtgggagagaattggcttcggggcggtcccattgcgatttgcccgtggcaaggtctacatagaacctgtgtggttgtgagtactttgctctttattaagatgagtagatacataccaagcgtggtatcgatcgtcatactgcgctgtccatccctcaggtaccgagggcgggggaggcccggaaggcggggcaaacgacatgatgacaggtattattgacttgaataggttgcaaggctgaaagcttcaatggtggtaatgatcaaaatgtcaagtttgaaaaggaggatgagagatgagtgagagagtgagagagtaagagaaagagtgaggagggagttcttgattcttccatggatatatacttagcggggagtaagcgggtaattgtggccttaggcatatagactgcgcctcccctggtggcggtgccccaatgtcatcattcaggccatgaccagtaagttaatcatggctttgggagttagttagggcagggaacatttagatatacatgcactgatgcagcctctgtccttgacaacgtactataccaatctgatctatttggcccaatataattcccccttcttgggattgggcgtcatgcaggatactataaatcgtatcaccttttctctgtgtacaaggttacaatgtgcaaaacaaaggaaatattcgatcttcggagtagtatgcatatacgttgagtatacatttggattgttgacatacctaaccatctactttattacatagtccgatctatagaagatgagcagagtggtattgtatgtatgaaaatggagaccaactatgcctaattgagtagttcacaggaacctgtatatatccaagtggaaggttctcttctgactctgctccttcctcgatctcttgttccatgccatcggtcctctccctcctcctcccacctcacttcttcttctatcctccagtcccaatctcgtctcttctcaccttccactacttcctcatctccaaaagttcccttatgtttaccatcatctcgcaagaatctgctcggaatccttttcgttgcatgtaaactcacttggtttccaacgagcctgtttgtcccaaccttcacgcagcgacttcattactttttttttttcgcctttcttctttgctgtttctatctctggttttgtttctgttttactttaatctcttccagttgacaacatgtctaccctaagcggaccttcaacacttggtcgaatggggaatgggggatgttttacctccaatgataccattgatgtgcgaaatctttcttttggacacgattcctcggtatgcttctcgggagacagctttgaatcgattctccagcatgctaatcacattggtcgcgacagaaccctcagaactcgattgctcattacggttcttccgatacggctgaaacatcccggcatggaatgttgcagtccttgtctggtgaaggggctgagcactcgtcgagcaaggtatgtgtttcctctggtgttgactcatgcgtttgggtgtctgtgatctcacaatcctagaagcagaagctagatcatatcaaagttgaacctttgaacggacaaacatcggatcttgacagaatactggccaagatttcccccaaaacacaacccctttcacgttctgaaaccgatcgctcttctgtttcgtcccagatcactccagttacaacggtgtcaactttaaccctcaaaaaagcccccaatccttacccccaggaagacagaacggtggagctccttcgtcttaggcaggaactccttgctgcaaattccaagattgctctgcaggagcaggagcttgcccaaacccgcgtgataaaacataccttggatcaagcccttggtccgtcatcagaggctgatttcggcagccgcgaaattacagagcagaccattagtcacctgcagaatgcttttaatgcatcgagctctgcattctctcactgtcaagatgcgtggagtgcccaagacgattcgcaatctgatgtctcggatccattgtctacaggagcttacaatagatctcgcgcactctgggcccagaatgaggctgccacagacagagaatacggagagagcctttcaggcaccagcagctcgacaagccaggagccaaatcggttctggggagtctcgaatgtgtatcctccgtttcccggcccaccatctctacaatcgcaaagaccacactcggggtccccagctagtccatgtggattctactcacgtcccattggtgaacagatgttgtgtccttcaggacccatcactggggctcgtcgctccatcactcaaaacagtaggggtggatctctattcccaattcagtctactccttggggtgaatttgcttctgggtcctccagtgagcagaccgtcaagtcacctgcttcgccgaagagacctcctagcgcctttcagcagatcgggctttactctgtgccctcttacccccctcgaccgattggcagccccctttcacctactgctaccgagtttacgggtaccaacacgaatgaaaccacatggaccaactcggtaagagataaccatgtgcatcgtgtttacattcattctaactcttgtcagacgagcggcaattccatccagacgtacgtgtccccactcgagccactcaactatcgacgcctgctcgacaagaatgtgtcgtgtgattggaagtacattgtagacaagatcatctgcaacaatgaccaacaagcttcaattttcttacagcaaaagctcaaggtcggcacaactgagcaaaaatacgacattatcgagtcaattgtgcaccaagcctacccactcatggttaaccgctttggaaacttcctcatacaacgctgctttgaacatggaactccggagcaagtcgtcgctatcgcgaatgcaatcagaggaaatacgctggacctcagcatggatgcatttggctgtcatgtcgtccaaaaggcgtttgactgcgtttcagaagagcataaagctatcatggtacatgaacttcttcgcagaattcctgagacggtggtccatcgatatgcgtgccacgtttggcagaaactcttcgagctccggtggagtggtgagcctccgcaggtgatggccaaagtaaatgacgcactacgtggaatgtggcacgaggttgctcttggagagacaggaagtctggtcgtccaaaatatctttgagaactgtgtggaggaggaaaaggtgagactccccgtcagataccatacgcatcaagccccttgttttcgctgtcctacttctctgttggtcctttatattgattatgccaatgctaatctattgcagcgaccggcaatcgaagaagtactggcgaagatcgatgtactcgctcatggccaattcgggaattggtgcatccaacacatctgcgagcacggtgctccccacgacaagagccgtgctgttgagcatgttcttcgttggtctgtggattacagcatggatcagttcgcgtctaagattgtggaaaaatgcctcaagattggcggcacagagtttatggatcattatctctctcgtgtctgcactggccgatctgaccgacctcgcatgccattgatcgacagtaagttgcttaggctttaacgccgtgaaaacgtactaatttttttttagtagcgggtgaccagtatggtaactatctcatccaatggattttgatgaacgccgcacctcatcaacgagagctcgtggcgagccacattcggtaacactccctgacagtctattctactttgagtggtctgaagtctaacctgatttaactaggaaacacatggtctcccttcgtggctctaaatttggctctcgtgtggcaatgctttgctgcaacccgtctcatgctacacgccctggtcctggggctggaatgcaaattggccgtttcaacaatttcaacgaagacaaatttacgaccacgagccaatccggtggtcgttttggccggggacatcaatggggaccccattatgcgccacttcgttgagtctgcctcttaatacttcatgttccctttgatgggcgtgcaaaaaaaaaaaaaaagagcaaaaaaaaaaaaaaaaagagcaaaaaaacaacaacaaccagaatcaacaacgaagaagaaaaagcaccagttaagcatttcatctcctctgctttcaagcagacagtctgtctttgccggtttgcctgactgtgtcttatcaatatctgtcgacccagttcccaattatccaatcatttctgtgtctcaatattgtgagttatcattgcttgccgatttattcatttggcttgctatccccagtggctatcatttcattcagtcttatggattgaagcttggggcgtgtcacgttaaatttctcttcaagaaaaccacattgttattacccaaattctaatcgaatatttaatccatcatgaaccttatgtggatagaatatcatttttagggagcagcacttggagtgtccacttcgtccttttcccatggtttccgtcgccgtggtttctcactggaaatatcgtggccactaagcaccgtgtctgggatgtcctggatcccaggtattggttgtcccgtagtgatgagttccacaatgtgtgcaaatgacgatggataagcaggttcagaacgtgttgaactctcagccccagatgtgcttgggtcggatgccttggagatttgtaagtctgtgttgcccagcccttggggctccgttgtccgcgatgccaaccacgacttgaaggcagaaaagtcaatagccggagtgaggttttcttttctatgctaatattagtacccaacccattttgcgtatatatcctcgacctaccgtgagaaaaagaaacacttcgcttttaggacaaggtcgtcatcccggttcatctccacctcggtggcgggggtgtcggggtgaccaagtattattgagaggccatttgcaaactcgggatccgatatgaaggggtaagaatgtaatctttcaaatatctgagcttgcgaggcctgcgccattgttcgatgaagaatacacacagatatctgagatgcggaggatgcggaggatgcgtggggcaatcttagttgtaagctaactactccgtagccgaggctcgtctgctctagtgcgctcgccaattgtttactctgcaccatttgaccgcatagagccttttctactcacctcgagaaatggtgaaagcgacatggcacttgcgagagaaaaagattggtatatacaaacgcctcacccattccccatgctaacttttggcccttgaacagaacagaaaaatccagggatatcttgcgacgccaaactatgcaatattgagataattccacaccctagaccatgatatccattccacctgacgttgggttgggtgcttcagagtgcagggatgtacttttactttgacaaccggggcagttatgcacgacctcatgggcaaagagatcgcagtcgatacaaaagtggttatgacatgcggtacactcgtagcgactgctcacactcattcccttggtctggttctctgtcatttgccagtgatcctccaaaggcacggacggaaaagaaagaccacaggcaaagcaagcggagcttcgcgaggctcgacgccacggcacctcgacccagttgatcaaggggaatagatgatgatacgatcgtgccaaatgggttgaaaggatcaaagtgagcccacaagatgggcattcggcaggaagactacacactttgctgttgcatcgtgagcaaagatagcctcctcgtgagggctttgaatggcatgcacagagcgagggataggactccactgtacgagaagggaaccccatcatcagcaatgagcctgcagattctttctgtgagtaggcagctgggggtgtagtcacgtccatcatcagctcccggaagtgctgctcattcagtgctactccatatgctgtttcatcaccaccattggtttttgtacaaagttcccggcaaattgcaacctgggctgcgagccccaccatattaaccctaattttgtcgctaatcagggtatctatcgtttggtgaatgtctccaggatcggaggaaaggagggaaccatatataaatagcacttctcgagtgccatggctaggtgtatggctaaattcaccaattagtttcgtttaaatcccccaggtttcatgtagccagtgtaaacacatacaaaagagcaccacgtgccatctccaatccattctgaagactaggcaaacctttcggatcttgtgttttgagggcttgaatggcggtgaggtgttctgttggatttccactcatgtcactgactcggagcgcgagaccatctctcaggccgaggacaccaagctgggagatgggattttgttcaaaaaattccctcacaaattcctgggcatatcggagagtcaacaagtatctcgtgggtcgcaagtccttctcagacatggattgtgaaagatccagaattaggatgagatgtcgaatgataccgcgctgtagtggtgtcgtatctttcaagagcctggatgaccgatacacttcagcaagaatatggggacacggcaaagggaagaaactgacctttttcgtttcccggcctccagaagcccttcaacggtcgagttgatggtaccatctgcaccctccaccagtgtctcccaggttctggatagctcccattctgcgcctccgcgctgctttcttttggctcgcggattatcgccccgagtcacctgtaaatcatcttcgtcttcggttacctcccccacatattcttcgtcggagtcggccatgttcgtaggtaagagtggagagagaaagagagaggatccaagcggaagaccgagaatggtccaagcttccgacggagctccgttggagaatatcctccctatctcctctttcaccgagtcgcaagtcgcaatctcttccaaaccaagcttttttggaatagctccgacgatagccgtagacggttaagctagaaaccccccgatgtggggaagaagatccattcgtgctggcgtagcagttcaagtcctccgtccagtcactgtccgccctacccctcctcttctttctcgcacactacacaaactttctctttcacattctcctcgactccggcctcgactgcctacacccgcggctatattagatctgaatttccctcccattaggcattgttccgccgaagtccgcatgatggcttctcaagagcgagagacacttcctgacgtgtgagtgatgccccccgcttgggctattatgtttctttttttgctgccttttcgtttgccacattcaagtcctccctttctttctggttcgcagcattggaaactgacatgacaatagagctaagcctatcaactaccatgtctcccttttcgacttgcagttcggtggttcatgggaatacaagggcgcattgaagatcgatcttaaagtcacccatgctaccagcgagattgtgctgaactcgaaggagatcgaagtacaaaatgctgagatattgggaaaagatggtacgtgtgggagaatataattagggtgatatagagaggacaaaacttatttcggtcttcttgtcatagggagccaattggccaaagtatccgggatcacctacgacaagcaatcagagcgagtttccctcgctttctcgcaagagattgcgccggcagacgttgtcctttccatcaactttacgggcactatgaacaacgccatggccggtttctaccgctcgaagtataagccggtgggggagccatctaccgacactcctaaggaggatgacttctactacatgctaagcactcaatttgagtcctgcgatgcacgaagggctttcccttgtttcgatgagccaaacttgaaatccaccttcgatttcgagatcgaagttcccaagggacagactgcactgagcaacatgccggttcaatccgaaagagacggaaacaagcctggtttgaagtttgtcacgttcgagaagacgccggttatgagcacctatcttctggcctgggcagttggtgacttcgaatacgtcgaggctatgaccgagcgcaaataccaaggcaagagtattcccgttcgagtctataccacgcggggccttcaggaccaggctcgctttgcactggaatgtgctcaccgcacgattgactatttctcggaagtctttgaaattgaataccccctccccaaagctgatctcctggcagttcacgaatttgtgagtaaccatttattccctatgtgttccaagcttttcatttgagctaaaatgcgagtctctaggccatgggtgccatggagaactggggtcttgtgacctatcgaacgaccgctgttctcttcgatgaagggacgtccgacaaccgctacaagaaccgcattgcttacgttgtagctcacggtcagtccccacatccattcgatctctgcatatgttgatgtcaagatggattcgttatctgactcattttatagagctggctcaccagtggtttggcaaccttgtcaccatggactggtggaatgagttgtggctgaatgagggattcgcaacctgggtcggttggcttgccgttgatcatttctatcctggtgagctttggtcgcttctggcagatgagcctctgacgcagtatctaatgtgcaagcagagtggaatgtctggtctcagtttgtcgtacggaattcccgaggtaatatccattatgctacgactgatattgacgttcttccaggctgaaggtgtgcaacaagcatttcatctcgactcgctccgcgcttcccaccctatcgaagttcccgttaggaacgccctcgaagtcgaccaaattttcgaccatatcagctacctgaagggaagctctgtcattcgcatgcttagtgttcatctcggcagggagactttcttgcgtggagttgcggactatctcaaatctcatgcatatggtagggcgtcaaagaagaagatttcaaggaacatctgctgagtggttataggaaatgcaaccacaaatgacctgtggtccgccctgagcaaagcctccggtcaggacgtgcattctttcatggtaagtaccccttagctctttgtttggctgtctgttggtcagcttgagatctgactgagctgccctagaatccctggattcgcaaaatcggattcccggttgtcaccgtgacagagcagcccggccagatcaccgttagccagaatcgattcttgtctaccggcgatgcgaagccagaggaggatgagacgaaatggtggattcctctcggcatcaaatccggagcagaactagctactgttgacacccgtgctctaaactcgaaatccgacaccatcagcggacttggggagggcactttttacaagatcaacaaggacttgtctgggttctaccgaacgaactacccccccgtgcatctggcaaagctgggccagtcgcttgatctgctgagcaccgaggacaagatcggtttgctgggtgatgcagctgcccttgcagtctctggcgagggcactacgcccgctttgttgactcttctggaaggattcaaggaggaacaaaattatctgtgagaaacttcgccttatggtcctttggtatcatttctaatctctcatcttgcagtgtttggtcccaaatctctgcatctctggggaacctccggtcggttttctcacaaaacgagaaagtggccaacggattgaagcaatttacccttcaactggcttccccagccgcagaacggattggctgggagttcaaacctgatgaggactatctcattgtccagcttcggaagctacttattgcaatggcctgtaatgcgggtcatgaagggtgagctatttttcatcgtgtccggatgttgttgaacgctctctaatacagtctcattatcttatagatttgtttcagaggccaagcgccgttttgatctctgggcgaccaaaaaagacatcagtgccatccatactaatctacggtcagtgattttcagcgtgaatgtgtccgtgggcggccgcaaggaatacgatgccgttaaggaagagtatatccagacagactctgtggatggcaaagagatttgcctgtccgcactgggacgcacaaaagatgctgctctggtgaaggactacttggacttcgtgttttcagataaggtggctgtccaagacatccacagcggtgctgtatctctggccgccaactcgaaggttcggcatttgctatggcagtacatcaaggacaactggactgttgtcgaaacacgattgtcatataacaatgttgtgtttgagcgctttgtccgtatgggtctatcaaagtttgccgaccaccagaccaatgatgacattgcggccttcttcaaggacaaggaaacgggggcctatgagcgtgcgctcgtgattgtctcggataacattcgaaccaatgcatcctataaggagcgtgaggaggcgttggttcttgaatggctgctggcacatggttacgcataaatgtgcatctacaaacatggtggctttatgattttcaacaataaatgtgttcaactggactctttctttgattttgatacagtgtcaaaggggattttagattcttcaggtcattggtccacgaggctgggtttatgcacgggatatcagttgagcaggtgatctccaggaaatggaaatcaaaataaaaaaactatccttgtgatagatatatcggtagaaggagaactaaaatcaagaagggacctctatagaagatatagaaaacaccgaaagaatagaaaatccgagaagtggtcgtgacgtgaaacaaagctgcgcatcaggtgcatctggctccctgcacctcctatcatttcaggcgactgttccatcattgtcccctcccccgacttcttaggaacttcgactccatcaactctttttttttccttcccttatattcctctggacttgtgtgtgctctatctctgcttttattccaccttcttatccacctcccagatctcatcatgaatcccgagtggtaagccttccccatctcatccatcccccaagttcccttctaactatgcgccctactttggtcgactatacaagtctgcctctgtgttgaatttgactgatgtgattttgatttctagagtattgttccgtcgttgatttgaccgtcacacgacccaaatcccctaacttgccgatctccgttgcctaatcatcgagatagatacgattaccttttcaagctgctcctcatcggtgattccggtgttggaaagtcttgcttgctgcttcgttttgccgatgatacctacaccgaaagctacatctcgacaatcggcgttgacttcgtacgtctcggaagctgcagggtatttggctgcaagagaatagtggtgctgacaggggattatagaaaatccgcacaatcgaactcgacggcaaaaccgtgaagcttcagatcgtacggctagattgaacaccgaacatttgaagcaaagctaataatgcatacagtgggataccgccggccaggagcgattccgtaccatcacatcttcttactaccggggcgctcatggtatttgcgtggtttacgatgtcaccgacatggattccttcaacaacgtgaagcagtggctccaggagattgaccggtacgctaccgagggtgttaacaagctgctcgttggaaacaagagcgatatggaggacaagaaggtcgtggaatacaccgttgccaaggtatgtttaaagacagacttcaaggccgttgggatagactagtaacatgtcttgattgcacttttacaggagttcgccgatagcctcggaattcctttcctcgaaacctcggccaagaacgcgtcgaatgttgagcaggcattcttgacaatggcacggcagatcaaggaacgcatgggaacggccactgtcaacaacaagccgactgtgcaggttggtcagggacagggtgtccagtctggatcagcaggtggctgctgctaaacggcacgatgttctctttgtgcggtgcggtgcttcaaattggcgcaatgttacatcatgaattgaggggtctcaagcggcgtggtatctaatcgacagaagtcaggcttgtcaggcctttggaaactcggcatgttcctgatgtgcaaggagacgattctccacagagctggcagtcgttatgatgatgccgctgggggttcttctctgccttgggttcgctttagactgcctgcgttctatcctcgttactgcgtttgctcgtgcgattaccgccggtttctgcgttctcatgatttcctggccacgtctctgctctattaccttggcccgtcattctctctgtgtctccccccttccccctttcctcttcacctttctattttctattttcgctttttttttctgtaggttggatttcccacttgtgaatggactaatagcgagaaccttgcgacttctcgaggcataatgcctcacatggggctactttttctattattttccggtaaaccagtgcattgtactgtgcaaaaccttatcgagttaaaatataacgttttagatacattgcgaaggcatgtatgaagatgtatgatcacatgcaagtcacaggcactgactctaaaataacctatgtacttgatttcctctgccacttcttggctttccatttccgtcttagtgctcagtccttgccgctttttgctcactgagtagaactgagcacgccccttagtattacataatcaccacgctcgctcactgagcatcacctgatcgttatataagctggatgactcgctcactgagcgtcacctgagcgctctgatttgctcactaagtagcctgatcttactcactgagcttgacctgagcgctctgactagctcactaagcacgacctgattattatataagctcaagactttgctcaccggagcgaagcgtagggagcagctaagtcagcagctcacctcaataaaatgcaccacgctagccccatccaaatgcagttgttcacaaggactcttgaccgttgtcccctcaacaaaaggctggcgtcatcaatttggcggtcgatcctggttatttcgcctccagctaagaggcaaattgatagtggggctacattcattggttttactattctgcggctatactactattcaactcgccgagtctcgcattctacaataccgtctctatatagttgcggaaaatatccagccctcaatttttggttctataatatctaggaatatctcagaaaaccccaattgagtggcttataaatctagtttagtgtttaattcttattttttaattcttttgtattttgcttgaataacactggtttatcgctcttgttgcctgcccgcttgctcctaggaataccacttcagctctagcgacctaggtatccgcaaaaatattctagactaatcgattatgtctactggggtgatctagctgcctataacgaaatttgagtccccttatttgtctaacgtactctaacgtatttaaactagcaatcagaaaataacttatcctagctgaagtccgagaggacttcctaggagctctagaccttttcgtgccaccgcaaacccaaactatcaaataccattggggccccagtgttgggtccgggtccgggtccgatatctcgacccaaccccgggttgtgcgacagactaaaccttcgtccgtttcctatcataattttacgatttgtataccattacttactaccgaggacggcagccaccttcaggagggggcacctatcaggctatggctggtcatatgacctgagccgtatattatcattagactagacattataatatcattatctttccaccagctataggctttcacgcaacagcaatagaggaaataatatcaaaagcaaaagccacaaccacgccgggtcgacagagacgatccgctccttggataagaataagagcccggatctagctagacaattgaaaacaagatgacataaagcaacgaacttctctcagcgcgaactgtctagccaaatgatcatgtgcaaagcagatgcaaatgcattcaagcctgcatagctgactcccacaacctgggaatctggtccgggaaccctctgtttggacctcagatctttgacggagatttggccttgcaagatatcggatcgctcccagagtgctggtacacgctcagaaacatttgaaatcgtcgccccggtccaatagtccaccgtagttcgccagtcttcgccggccaaatcaatcttaaccaacggacggaagtcaacatccttgaaaatcaaaatgaccccatctgggccagcatagtccaacgcatacttgagtgaggaagtagcgtataaaccgggtccgaactcgttctgaagcgtgtatgaagagacgaggggcgcgaagagtgaggctaggctgactattgacggacgtgataagcccttgtaaagaagattgccgccaagtgaattgatgaatgtattcatcaaatcaacgtaattttcatcacggttgttcttctttcccttcagttttgtcttaatgcaagaaatagttggcggaaaagattggaggcgcgcaaaggggaagacatcttgaatcctgttttgagtaggagttgttgtgagatttgggggaataaagctggcataagaaagcgcggaagcctggcgtcggacaggttcttcatagatcttgtccatgaatgttgctggtatcttcccttcttcaaacaaaattgaaacaatccaaagacgcggagaaccctgtgggatcgaacggtactcatctgtaagaacatatgcgggatcgcgaatgagctcttcgagctcttccaccccctcaagccaaaaaaggcttgacaacggtccgatgaacaaggagacctgctcgccatcctcatatagatactgtgatatctcttctggaatgacaccggggaattcaattcctgcagcccaaacaggttggtagtcggttgcgtacagatctagtatatctctctcgtctctcattgtgaaggtattttggtcacttcgagtttgagatggagttggtggcgaacggcaagagctcttcgaggtggagtcgttatcactggtcaatgacggtggggttttggaatgtgggacgcctggttcggtctcggctagcggcagtggtggtacagcaataggaagactgatactagacgcaactgtaccaggggaaaactcccgctttctctttgaacttcgagcttccattgtcaagtaacagaaaggtgaggttgtcaaggaaaaaaaaaaaccttggaagaacagaaatggaaagagttgttgtggtggacggaattacggttatgaaaggttaccagcgaaattttgctggattacatgtattataccagaacctgtcaggtgacctaatagtatactcccgataagcaaaaacatacacgtgacgtaattagcgtgttgcattttattgatggtgcttactcaggccgctcatgcctacgccccgcaaaaagggcgggttttggtcactgtattcgagcccgcagcttttgcgggctaggtagtagtctcgagtacagcgaccatcgaagccttttgggcagtagaaaagcatcgttactttcaacagaatgactaaatcggtctcctgggccaggtcgtttgggtatactctgaattagactaagtgctcattagaggactctgagcggtctctgagtaatcagcgagcatccaatcagactcactgagtgctcagtgagcgttcattggatctcactgttgagtcacgtgaatatatctgagcagctcactgagtcggagcgcggactgaaatctactcagtgagcctggctctgagcgccctcataaaagcggcggcagctaagataggaaaaccccacccggcagaggaaatcaagtacgtatagctacctacgtacttgatttcctctgccacttcttggcgttcccttaccgttttattgctcactgagtaaaaccgagcatgctcccgagcggtctgatccgcttaactaccgtgtagctacctaggtagtccggggatattcccaattccggtttattacctcggtagttagaacgtgacacactcaagtcacttgattagcatgcaggtaccgagttcgtcaataaataaatcaaatcaaatcaaacccatcaactaaataagcttgtgcaaggtgaatctgcgctatggggcgtctcggaatgcagtggagttggggaggagccgaggcacacagtacttcggcaaaacgtcatgaacatccatcccatccccggtggtcttaagttctaaacgttcttcacctcctgacacattccatcttcttctgctctttataggttctacgttacacctgaaaataggtcaataggccaagctcttcccatcatgtctcaaccaggagccgagcagagcaaggcagcatctgctgctgttcaacagagtgataacatcgcgcacgcgctggcgggtgcaggagggggtgttctgtcgatggtcttgacgtatgcttcccgcattttccccatcgctgctgctaaccccatatccattctagataccctctgatcactctgtcgacgcgagcccaagtcgagtcgaagcgtgcgcactcaaccacccttgatgccatacgccgcatcgtacagagggaaggtatatctggactatattccggcctggaatcagcgttgtttggaatcagcgtcaccaattttgtgtattactattggtatgaattcacgcgttcggcctttgagaaggccgccatcaagggaggccgagcttcgaaaaagctcacaacggtggagtctatgattgcgggggctattgcagggagtgccacggtgctgattaccaacccaatctgggtcatcaacactcgcatgactgcccgcaagtccgaggcggaggcaacattgcctggtgccaagaaaacgaaggcatccaccttcagcaccctcatagacctgctccggcaggagggccccaaggctctatttgcaggcgtcctcccggcgttgatcctggtgatcaacccaattctgcaatacactattttcgagcaactgaaaaatatagtggagcgccgccggcgtatgacgccgaaggatgcgttctacttgggcgcactgggaaaaatcttggccaccagcctcacctacccatacatcaccatcaagagccgagcgcatgtggccagcagggatggccccaaggagagcttgaacggaagcctgaagaggatcattcaggaagaaggctggaagggactttacaagggtaaacattctttggaagtcatactggatgttcactaacatatcctcaaaggtattggaccgaaggtcacccagagcgccatcactgctgcattcctttttgcattcaaggatgtgctgtatgatctgatggtgtctgcccgtagaagaggtcgcatcgctaaatagacaggaaatggctccaagcctaccggacctatgtgacaactcatacagccacacttcatggggagacaaggtccggaccctcactgtccactatgtatacttgttcgagtacgaggaattcgagcgggcggctttcacttcactttctcactataaagaatgacttggtgaaggttcttgaagttattggagctccaaggagcccttctaaagcgatacccaggtactcaaatatgtagtttagttatttatttgaaattcactcttatactcctttaattaaagaatccatttggacctgaccgccttatctttgattcaccgcccatcatcgcctatacccgcgttatcgcgttctcgacgcgattctgctcaatttctccacactttctcctgtatcttgtgcactctggttttcagttctggcattgattcatctgcccctctgcctctctgtgcctcaatatttctttgagcttctacacgtatctctcccaggtgtgcttctcccggtcgtttaggtggaaaactcctaatgctttgacagtccaagcttgcctctccatcgtcgcatcatcacattatctttgtgaccctcgtaccactagttagaactatctgcgctcgctacggatattgtctatcccacctattcgaaaccaatatcttgcgcgactgttttgcctaagctctaatagagctagctgtcaaggctataccggaacaattaatttcccaccaaagccatccaaagacataggcttctttcttttaaaggaaggaacagaaacacacccgaggaatcggctagttggaaggcaacaacggaaacctcgcgtttagtgtgaacaaagtgagagccggggccgatgttatgtctttctcactttgccatcgtccgacaccagacgtgagccagccaaaattcatatcaatcaagtcgttcatgtgagagctttcttctttcttttcacattcatacctgacgcttttcttccctttctagcctagaacatcagttgtgcttctaaaatgtctcacggcttttccagtcttaatggccagggtatagttcctgcattccctggtctgtcagcccgaagcatcccagaagatccagatatccaacgcgagactctgcgattgctagtgcagtattctagggtctcttctctaccggagaatccgtccactccggccacctctggtaatacgagagacgaggtcagagatgtctggcagagtccgcggactgaagtccaacctagtgagggctcacctcttcaaatatcacctcgactcatgggttcatcaagtggcagccatgccactcaaccttctccttcccactctatcgctccttcctctggcagtccaattcgggtttcccctcgcacttcttcgcgcgcttcttcccgcgcttcttcccgcgcttcctcccacgctccttccagggctccttcccgacttccatctccccagtctgtttctgtctctatcccttcctcacatggcatctctccaagtcaccgggagcgccaacggactcttagggaaagtgtggcaatctcaaatgccagtaggaacgatgagataactgcacccatgccaaagcagcatttctcttactcacagggtgtcatgtcatctgcctccagatcccctcactcccggtcaatatcgccaacctccgagcaaaattttattcgtcgttctagccgaaatagagccaaaccgattaattattacgccaatccttgggtcaatgttcccgttgaatctgaagagccagacattaatgtcgaagctattccggacacagtcgcgtcttctccacaggagccgcgtcgcgttttaccccgtcgtccaaatgtccaaaagctgctgtatagccgtgagcttggaggcggaaatcatcgccccattctcgccgatgtggtctcagatctgagaccatggaaatcatggcaaggcgcttcgggcgatctgcttgttctggcttggtcgcctgatggtactcagtttgcggcaggcgccgcagctaaatcagatgaacataatatgcagtacaacaagacgaacaatctccttttaggtgatcttcaaagcaatcgtctaagggaaattccagaccattggattccacgccccacaacttcgacagttgatgacccacggctgtttatgagtgtcaataatatgcagtggattggcaaccgactctacaccgctagttttgacaaaactgtcaagatttgggacgtggaatcaatctgcaacgtatcctgcactcataccttgcagcatgattcccgggtggcagtgatgtccgtctcgagattcgatccggatatattggctacagggactgaatcaattttggtctgggacacacgagatcccgaaaatatgacatcgactctccttcccatcgaccgcgatgcacggtataagcccaactttgagttctcatcgacggccctggcctgggggcatactccgtcgactaaggaattcttagccggaggtctggccgaaataggggaggatccagtatacaaaggtcacctagggttatggcgagctcgcgaatctgcgtttgagaccatcaagatggcttccaactcactaaatgtctttgacatcaaatggcactcttcgttgcccttttttgcaacggccagccctgaggatcctcacaacgcacgcatgaaaggtattggcattaccacgaaatcaatagtgagggtgtttagcctcaattgtgacctccaaaagcgcgtgccgtccgtgctggaattctcctgcccggccttagatatcaacgaggtcagtttctgtccaatgggttcaaacagcacatatgtcaccgctagttgcacggatggaaaaacctatgtttgggataatcggaggggcgatagaattcttcacgaacttcgccataactctccccttaacccgatggatcaccaacgaagccgggaaacggcagacgtgggcgtcagggtagctctgtggggttcgtctatggaccaattctacaccggtgcgtccgatggtgttctcaaacgatgggatattcgccggtcaccagaagatgtcctcgtcgaggatgtcgcatcttttgatgaggagatcatgtgcgcatctttcaccgatgatcaatctcaactcctcgtcggggggtctggagggggcgtgcacgtgctctcatcgggaccttattcggatcctaacataggaactttccagttcgaacatgccccagaacccgaagagcatagtgttagtggtatcgttgcgggaaatcagcttgtctcatccggccaggttgtaaagcacgaaacatttgggatgggtcaagggccctcttacacggggccttttgctatgtgggctaggaacgcaaaaaaaaacgtttctcttggtcgaattggggatcttcctttgctcaaaagatatcagagccaacaattggatggaccaccgcctgaagatcgtcacgaactcgatttgaatcagcgacaagaggtcgaaagacaaatacaaattgccgaaatacgaaatcgaggattccataagagaaaacgccaggagccttctatgatcgtctttcaaggccctatatatttgtcttcccttggctcttctcggccggggaagaagaggaagaaaaaagccgagagaatggatgtgaaaagggaaggaaatcaagagggaaatggagcagacaacagagaagataaagcgaaaaagaaatctcggacgaaaaagaaggctcgcaggttcgcgtctcggataattagcaacacagaatatgtcgaccttactctcctggattcagacacggagatggagacgtcaaaccgacatcggttcaacctcgaggaactacttgaggctcttgaagaagataactggttcccggctagtggggaaatcgatcctaacttccaaaaggagatcgtctaatgtggcagctttcttgatattgttgatgtgttttgcatagcattgaagcgtggagttcagatttggttgttttaaataaattcacgttgcagcgaacgggtttatcaatgatgtttgtgtatgtatgatcgataggctgcaatctcgaatgtggtagcctgtagatatacaatgatgttactatatatataactatagttaactatcagggtccatgccacgtgatccggatgacgcgtaatggatccaaaagcatacgaagacggaacaaggcacattttcttattatagaaaacaggaggttggaatagtagaaaataagaagaataatgcatggtagagattgctatgcaataggaataatcatacataggcgcatgcggatactttcgaggtacttcctcaacccttatcaacttcgtatccagtatatgggcgacggatcggaccactacgacaaaactaattttctgccgagcagaaaattagtcagctagccatacgctgttccacagctgtaatgagtatacaacaatttatattttctctaattactcactttccaacggtcgcattaagtttaaatttgaaggtctaattaattaaaatgcccctctctaaaagagttataaatttcaaactaattacaactattagaagctaataagtaagtatacctaagtaagtaagtatagagtaagcaagtaagtgtttcgggaggaaaatgtcttcctggaccgccttcctattaaatatactgccgactaggagtttcaaatcggtagaactagcagaattctaaaaggcggtaaattctagtatagggcattaagatagaggaatagaaccttatagcatcgataactaagcaattttataaatactaagactattttatacctagtagattattctaggtcatataacctccccgtataccaccatcttctcctccttacgcaaattgatattttccaaagtatacgtattctttatatagtacactctcctctcttaaatatggtactaccattatagagagaggtaatctactctttaaaaggtttaaggttaattgatagacgtatactagaggtaaatgtaaagaggttgcaatattacatacaggcctaagacaataatcatataggcggtgattagagcggtgagccaaaaattagttttgtcgtagtggtccgatccgtcgcccataccagtaatgtaagtggcgatacaaatcaaattgcatctctcgcgttgcaatttattatggggacatatctcaaacttatatttccccaacaattcctttgtctaccatatacctagtcatcatcactaggtacattcacatatcgcttggctccgccgaaaacgtgtgtgtttctatactcgacgctcattcgcccaaagagattcgtcatcgacaaaccggcgaaccaacccgccctttttcctccattaattagtgaagcggacacatatcctcaccggaaaccattgagcggaattgcctcaccgcagctgcttcctcgcccttctcgggtaagtgacaccaagtgcgggttcttgtcgggggggggggtcggcgaattgacgttctctgaaggtagtctagacgttccgggtcgcgcaaaatggctacaactacagtaaccggtcatgggcgacgcgcctccatacgccaggccgaattgcaaattccaaccaaatcctccgttccccagtcaacgagcagtccgatagacaaattcccgccgtacgaagacaccatcgacgccgtcgcggggtcaactcggccaacccgaagcgcctcggtgaaatataccccgagcgaggtctgggaaccccgaaaagcaaccttctactcacgagagtatgggaacggatcattgcgaaatcccaaacatcgcccacgaaagagcatcagcgaagccatcacgacgatcagaacacgcaatggcagtatgagtgccagtgctcatgaattggccgaagtacttcgcgccccagtctcttaccgactcattgtatgttgattcgcgtttcgagatgagaaatttgcaaaggaaaacctccttcaatcaggccgctcgctaacacactgtctctcaagggtctctgtgtcgtttggtatctgacctctgccctcacaaacacgtcctcgaaatcgatattgaacgctcttccgatgccgatcacattgacgatgattcaatttgcattcgtctccttctggtgtttgctattggtgtatctctccacagttatacctcggttgcgacaaagtatcccgatccttcaacatggaattcgctacccatcccgcgacgtgatttccacagcattgcccctggcagtatttcaattggccggccacattctgagctctatggctactgcacaaatccctgtatctctagtccacactatcaagggcctttcacctctctttacggttctagcataccggatcctgtttcgcattcgatacgcccgggcaacctatttatcgctgatccctctgactctgggtgtaatgcttgcatgctcgaccggagtgtctacaaatttcttcggtatcttctgcgcatttggtgcagctattgtgtttgtctcgcagaacatattctcaaagaagctattcaacgaggtagaccgtgcagaatcagatctacaaaccccggggcagcgaaagttggataaactcaacttgctttgttattgctccgggctggcttttttcctcactctgcctatttggtttgtcactgagggttacccactagtatctgatttcattcatgatggtgtgatatcgctatcgggtaagcaaggctcattggaccacggtgctcttttgatggagtttttgttcaacggagtctcacactttgcccaaaacatcctggcttttgtgttgctgtcaatggtatctcctgtgtcctattcggttgcatcattggtcaaacgtgtgtttgtgattgtggtagcggttctatggtttgggagctcgaccacctcgattcaagcatttggcattggcctcactttcgtgggcctctacctttacgatcgcaatagccatgatgatgtagctgatcaaagggcaaacacggatcatttccgtgccgaacagtccattcttccaatgaatgtgcggcacccaagcaagccatgggattccaatggttatgccttccccgcggggagggtttttgaaggtgctctcaactcccatgctgcactaaacaactccaagaaggaagacgatgggcctgggcatgttcgaccaagaggggccagtctttctcgtgcttggttaccaggcaccaaacaagaatccacttggcaggttagtgattctcaagctgcaacttagcatttgtattttattagttcggtgtacaatatcatggtagcgaggtgttgctcggaagagctttgacgtgactatcctcttcccttgctgtgtttatcctgcctaggatacgcagagtatataaatcatgatgtactttggctgcggcatagtcctaattacgaccggaaatctcaccagatgcgatataggaatatcatgagcaaatttagaataaatagaaggatggtatctgaaaatgtacagagtacaaaaattatatatcaggtgaatgtagctaccgttggtaaggaacaaagtcatcattaggcgaacctttgacagctccagctacggtgcaattctgctcttgggacatgctgtagaggaaataggaacagggaaattgcctgcctcctacaataaatgatgcccgttaacaatttaattggagaaaggaaagggagaaagggggtgaaacggtggcttataaggaaacccggagcggaagtttatccgcctaaccgagtcaatcgagccaatccccgcgagtccatttgccgttgtccttccaaggttagtcagcaaagtgatggtcagcacattatgtaactgcagattccgatgcaaagtgctctctgaacttccaaccgtacccaggctctcaccccctcgccctcctccaccttatctcccaccctcacatctctgttctccttctaatgatgcggccgcagctgtttcgtgcggccgcccggtccctccgggttcctaaggtcactccccgggcattcgcgacgacagcccctcgcgcggcccaggtggaactcaccattggtaagtccaatctttatctaatccatctaagttgatcgataactgatagcttgtttctctagatggcaaaaaggtgtcggtagaaggtaaatactgcctcgagataacttattgaaccttcactcacattctctcccaaaagctggctcggctcttatccaggcctgtgagcaggcaggcacaacggttcccaggtatgacaaaaccccaccagcccgatttgcttgcagtactaacatgcaccagatattgttaccacgagtatgtgcctctgatcgagtctcacacattgtttttgctaacaccagtcccttaagaaaacttttggttgcaggaaactgtatgtgaaattgacaataccccgtgccacgccattgaggcatgtgtacttacagaaactataggtcgtatgtgccttgtcgaagtcgagcgtgccccaaagccggtggcatcatgtgcttggccggtacaacccggtatggtggtgaagacgaattcaccactggttcacaaggcaagagagggtgtcatggagttccttctctccaaccatccgctcgattgtccggtctgcgaccaaggaggagagtgtgatctccaagaccagtcgatgcgttacggtgccgatcggggtcgattccatgaaaccggtggaaagcgtgccgtggaggataagaacatcggcccactggtcaagacctcaatgaatcggtgcattcattgcactcgttgtgtccgattcatgaatgacgtcgccggtgccccagaactaggaactgccggtcgcggaaacgacatgcagattggaacctacctcgagcagaacctcaattcagaactctcaggcaatatcattgacctttgccctgtcggtgcactaacttcgaagccctatgctttccgtgcacgtccatgggagctcaagcacaccgaatcgatcgacgtccttgatgcccttggctctaacatccggattgatagcagaggcctggaagtgatgcgggttgtcccgcgattgaatgacgatgttaacgaggaatggatcaacgacaagtcgcgattcgcatgcgatgggttgaagacccaacggctcacaacgccactcatccgtcgggagggcaaattcgttcctgccacctgggaacaggctctaacggagatctcatcggcccacaagaagttgcagccacaggccaatgagttcaaggctattgctggacacttggttgatactgagtcgctcgttgccatgaaggacctggcaaacaagcttggctctgacaaccttgccctggatcaacctggaggtggtgcccctattgctcacggtatcgatgtgcgctccaattacctgttcaattccaagatctatggaatcgaggaggcagatgcaatccttttggttgcgacaaaccctcgtcatgaagctgcagttctgaatgcccgtatccgcaagcagtatatcagatctgatctcgaggttggacttgtcggcgaggagtttgagagcacatttgacttcaaccatttgggcgctgatgtctcttccttgaaatccgctttgtccggagaatttggcaagaagcttgccggagccaaacggccaatgattatcgtcggtagcgctgctgcagaacaccctgatgctaaagcaatcttcgaggctgtcggtggtttcgttgagaagcatgcaagcaacttcattaccccggaatggcagggctacaatgtcctccagcgtgcggcgtctcgggccggtgcctatgaagttggcttcactacaccatcttcccaggttgctcagactacccccaagatggtctggcttttgggcgcagatgagatcgcccaaagcgagatcccgaaggatgcgtttgtcgtctaccagggacaccacggtgatcgcggtgctcaacttgctgatgttgttctcccgggcgctgcatacaccgagaagtcaggtacatacatcaacacagaaggtcgtgtgcaagttacccgtgctgccacttccctccccggtgcagctcgtgatgactggaagattatccgtgccactagcgaattcctcggcgctcctcttccttatgacgatattgaggctctccgcgaccgcatggaagagatcagccctgtcatgcgtcgctacgacgttgttgagccgacctcggttgtctcgttgagcaaggtccagcttgtggaccagaataagggatctcaagctactggggctcctttcaagaaggtgattgaagacttcttcttcactgacgctatctccagaaggtgagtaccctggttgttaatcgatttgcattgctaaccctgctttagttcgcccaccatggcccgcgcctccgctgccaaggccactggaaaccctgagaccaatttcatggccgcaggagaaatgtctcctcaggccttgtatggttagatcggggtctatcttgacctcattctgtgtttctctaatgtttgcaggcgtttttattgtaccacatcttaaatttccctcttgatgtactgtttcctttccatcctctgtgtttttccctatcatcttgaacacctctccggttcctgttgacctcttcgccattctccggtgtcgcctgggattaatcggtagtggttaccttgtacataaagactgaacccccaaaatttcgagtccatgggcgtcggagatgatgaatatgtgctacttccgtagttttatgcgtagcagctttgaaatgacagaagaagtgaaattatactaggagaaaatgactcggccaaaaaaaaaaggaatatccggacagggagcagaccagatccatgtatcaaggagtctcctgtgtcgattgggcgcttttctgcacttctgcatataagatggaactatatcttgatcttttgaactactttatctgacttgttccaagtggccagtttagagctcatcatcatccgtctctcccgcagtttcctcggcatcttcgctgggttgggctggagtagtcttaataggcccgccagtccttttagcaaatggcaaatctctttgaggcggcgcggtgtctcttgctggggaaactcgcttcagctgggcagattcatcctgagacgaatcgtcgtctgtcgtgctactgttctgttcgccgtccgaaggatgaggggtcgaatgctcttcgtccgtgtcttgattattgaaggcatctggattggtttttattggatcaatatccatttgttcgaacccatcagagtcgtctgtatcgctcatcttgcgagcacttctctttgctgaatgagatctctcggcggctctatctgactctctgggaatgctagcctgtacctcggagactgttgatacttagtcaagatatccaggtttctctgtttgtgccacctacctttggttgaatccacggtagccgatgccagaagacgttgctggttgcgaattttgagctttttctcgttcaagacctgcacaaaattggccaccagtcgattctcatgctcggtcttcgcatgcatgagctcctcgagctgttcattcaacctatgtatggtatcttcggcaagacgatagcggccggtcaggctggatacttgttgctctagcatctgagctctagccgctgtgattcctgcccattcaaaaagctcgacggcttgttcatcgtcttgcttgagggtaaaagcacccaggcgttgctatattagtgttaatatggctatatatagaatccatcgcgtagaacacgaactgtgatagtctggactcgcttccgtatcgtgatcacaatttccttgtcttcatcagagcctgatatactggccgaagcttcgagaccagtggcccaatccggctcatcaggggcagaacattgtcccagaatgagagagactgttttaacccattcatcatctgatccttggtaattctttgcttgaagatcattcaagcgtgattgtttcactgcgcgacatgagctcatgacttccagatttcattctatgacgacccacccaggctaacatagggtgattccccctcggtagccgtcaggctcagatcgagccgagcagggccggtacatgagacatggacgagtacaaaagacccagtctcgtcagacctgggaaaccgcaagactcgaggatccgttgagacaggagatagcatattgggtgtgttattgcctacggagtaaatgtatggtagtcgttagttaggtactgcaagtcatccaggcaacagagctcaagtggatatgaccaccgtacctatctccacatacggagtacttaaaattaccaatagcggttttttaaattggtcttatagatattacatactataaatacccccaaccggtaaatacatatggcttcaacgtgaatgttctgttaatcacgtggaattcttgttctcatacacgtaatgcactcttcgaagtatgcaggctccaccgaatctccggtaacctgattacctagatacattaccagtacggggcctgtcacgttcttcctctcctccacgaggaatctgaaggtccagccacaaccgacaacacctttctttccccctgtctcctcttcgcttttgcaattgagttcctttggtccagcggccagaatcaagtgtcttggggtgtccctaatgcttaactgtcctcttttaatgaatgtttatggatgaaggcctgccatttatcaggtcgcctagtgaacccgcttggtctcattcggcgaaatcggttctagagcaaggccggcctctattgggctgattattctaactgaactcacttgccactctgcgatcaacagagaagccgtgcttctcacttgcaacctatcttccattcctaccaaccgacgcggaatgacgctcatgttcgcaccccctgaaccctcaccagtgtcgcaaagcactgagtctgccacttaataacaactgcctccggacgcctgtaatcatcccatgaccttcgtgttctccgtacacctttaatcaattcgcttcgctgatcatggaatctttaccaatccacctacgaccgggtaccgacgagcccattgaatgctgggatgatgacgacgacctgcagttcagcgaggatattcaatttcgcaccgcatccagcgctggctccataacgaactcgtcatttcggccctctgggcaccgagattctatttcctctcgacgctctgctcgctcagatattgactctaatgcgggcgatgaagactggcaggtaccgctctacgacaacgatgaatttgcaaaagaagatgctattgcttcggccaagactgcgggcattcccattcctccagatatccccaagtcagctcttattgggggcacgatcaagcggttatcaactcgaaagaccaagcaaacttttgttgacgactggtcagaagacgtcgaggtcccaggtcctgaaaccctgttacatctcagaactcctcgggaaaccatatttcctgactctcttcgacatttgagctccgctgctactagtccagtgaaattcactgcctcgccatcttgggatgacgaattctcgacgcgtttgcaatctcccttgggaccatttgacaccttccaagacgacaatgatagcccagaagctcgtatcccaactctcaaagccccaactcctcgatctccgaagaaattgaacatcgacgatgtcggcagtggcttcggtgttgaacgggaagcagacgacgacttcaaccaggattttgaacttcccgccaatcatcaacctcttgaattatcccatcgaaaagataatttttacgtttccagtcccactttagaggactttgatcttgagtggtctgaagggagtatcggtgtacgagttggtggtaccgcaagggatggtcgttcagttcctagttcttctatctctatcgccagccccagcgtttcaagctgtctcaccgcagaaagtgaagacgatggcctggacggtatcgtcatccccgaaggtccccttgatttcaatgcttctctgcaaaagcgacaggctgcgcaagctgagaatatcgaagcggaagagagtcaggtgggccatgtttgttctgacgccgacgacttcttctctggccttgatatcgacaatgagaaggcattttcctttggaaaacctgctctgaatcccaacataaagtgcaaaacagaacggccatccagcccgactcctcgatctgcaacaacactcacgttcaccagtgcggcaggatctccacggactcgtattccacgcttgtctgggcatgatcggacccattcaacccaccttgagactgtgtccgaaagtggggcgcctctttccaaatttcgaacatcacaatcgcgtctagggcattcgtctcaatcgtcaacttcaagtctcccaacccctatcgttaatccatcgccagcccctacactctctgctcgatggcttcttgggtctcgcaatttccgggacgttgccccggcccctgagggtaacccatcagttaggcgtttaaagactaagcgatccctgccatcgattcgtggcttaagctcggccgcttcagtggccgcttcccagcgaccaccggtcgatcgtccagtccgccttccctcgaccagacctaaaacaccggtggatcaccccgcaactgatgcgaggtcgctgagtcgcaggccacaggtgccatttatgccggctggtgtatcggaatcccaatcacatcatgtcagtgtgaaggggtatcgctcgtcacgtcgcacaaattcagatagctccggcgggcttcttagtccgcagagcacagcttctcgactctcccggccaactcgcaatgagccgttccgtgctgggtttagcgacacaagcgcaaactctctcggttcctctacaaaacgtacaatcacacgacccactaaaagacgcaatttcggggacggaacagagttagagtcatttgatgacctatctacatcggtcttggcagagagcaggttcgtcaaaacccccactggtcgaggtgctccaaggttggtccgcgccagactcagccagagccggattgatctgccacgtgatgaatcacctactcaatctttaacgtccccaccaaactccaaactgcgcagtccgacccctaggtttgcgcgagatacaaatgcatctagaaatgcgagggaacaacgcattgcatccatggctattaattcgaaaggccgtgaaccaaatgctctttcgacgttcaactcaaactggaagtcccaacctgtctcaaggattcctccggcctctgcgacggttagaagccggaaaggtaaaccgaatgctagaccaacgtccaagccacacttgatcaagcccatgggatctggggtgcaggatgccaaatgtaagcaagacctctgatctctatttacacgatttgcgcaatcttattaaccgttttcagccgtgaggggtatgcgttacaatcctaccaatttccggtgggaagggaacgaaaatctagttcaggaatttgatgccgctgctcccaaatcacccaaacctgcaccggctctcatcgccaacgttggcgcgatgcagaatgtccagaccgttggtggtatggtcttcgatccacatcgtatgtgttggctcagggcgtctcttggagctggtgcagacgaagacgacgtgtttgctggtttggacgacttggatgacaaaattaccagcggcaccatcaatggacgaaattctggagccattgaggagcaattcccagcagttggggatgacgcaagtgccggtgaatcctctgatgaaggacctatgaccgaggaatttgatgtcggcccagaattcattcgacgacagcgggcggaggaagataagtggagacgcaaggttgacaaatgggttggattcgaccgaggcgatcacgaccatgaaaatcattgggaatggatcatccgcgatttagtggcttttgaccaccatcggggatcagcatagaagcacgccagatttgacgtctgcatatccacagagctttcccggacaggggtcgccttcttttacccgcatgtgtccatgtactaacccaaccccccaatacacgaacttacgacttgaagacccccatcgattggccgtgacgattcggccgatgtcatgaatttatggttttctcctttttcccgggcatatctgcccatatctgaccaaggtctgaccacgggggcagatatgctatgtaactatatcttttgttttgagtacatacagtttaatatctttttcttggagaggaggctattgtccttctgagcagtctatgcctatctgttgtatattattttgaacattcggactcgataccaacacagcgctctgttttctcaaaaacaaatatatataatcggaaagcagcagagtacatctgtcacaccagatatgttttggactgtctgcaagtctgcaggtctgcgagggtccgaaccttgaagcagtccgatgtgtctcaccttccaaccaaacgtatgtcatcctgttgtcccgccttggtacttctccgtacttctccgtgtacttttctttttccctttacatccacaaccctgcaaaagtcccttctccaagtggacttggtgaatggccacgtcaaatcgaagcctctttctcggatactcacttgcatctcttcccatttgggaattctcccccccaaaaaaaatcaaataaacaatacggtgggacaacatagcccagacacagtacaacattgacatgacagggattgccagcccatagaagacttcaaatctcgagggcccgattcatcacaattgccctagagcacttgtttgtacatcgatgtacacccattgacgatgacccccctcccgttttctctcttttcttccccgcgctctctccctgtcccctcttctcaccgaatgaacccaatggggaggagcttgagggtgcagaacttcctatagtggggattctcaatccatgttccttaccaatttgcacggctacttgcatggacagagataccttttgccgggggtatctcctgccgactttgtttgcgaagcaaacgtgcagaaacaaagagagtttcccccctttcctgattcgaatcgggaagatcctcctacgcgggagtagagttgttccgcaggtctaagtataggaaattcggggagatgatcttcgcccccccgctgtacttcggccaaatcaggagagccgaatgggtttccccccccccccccccaccnnnnnnnnnnnnnnnnnnnnnnnnnnnnnnnnnnnnnnnnnnnnnnnnnnnnnnnnnnnnnnnnnnnnnnnnnnnnnnnnnnnnnnnnnnnnnnnnnnnnnnnnnnnnnnnnnnnnnnnnnnnnnnnnnnnnnnnnnnnnnnnnnnataagggaggccgaaggggtttcccccccccccccaaagtcagcacaatctccgatagggtgcctcgaatagcctgtccactcccatatcctcaacgtggcttcttgaatggtggcgctgattgacctcagggcatcgaaaggcaggaatccgtatcaccattccttctgtgcgctgtcgtatcagcctgcttccacttttcgataccttcggcgggtcggacagaattgaccacgaaccccagtcctttctcactgcttttcttttcttttttcgttagatccatgccgctatcttccctgcaagctttgctaatatgcttccgtaccttacagagctctgttcgactcgcctggctccatcatttctttttctctgtggaatatttgctgttcgtcttccagggatgccctctgttgtctctgcccactatctctgtcgcgacatggtctcgtgcacttcatcttgggcatcagccatgtcagtcctgcactgtctgtccatcgaggtctttttaatagaattgctaccccgtttccagatgggctttctctgaattattcctctttctctctctctatatctcactttcgcaccgagatattatagacactgttcaattatttttgtgatacttgctgtggtgtaccagggtactgtgccaattcttcttcgactacatgcaaatgagttagccaggtcttcgtttcactatcattatcatcatcaccttcctcggagactcgctgtatactgcctttttttttctctctatattttttttaccccttcttattcttcttcttcttcctctatctgtttgaaggatcaacgtgagccgaacaagaatcaagtggcattccgactcagtgaggtatcgattatgagcagctttacaaggcgcaacgaagggaatgatgcctacctcatgaatcatcaaatggcaatgcctggctcgtacggtcagccagagagtcatgacttcaagcaagagagccatgacttcaacacgcatggatctggttcatatcatttccctcaacattctttcaacccatatgggtctcagtttggccagccctacggtccacagtcgagtctgtctccggggttgcagcatttgcagtatacgtcggaacattcgattccatcgatgacaaccccggatgacccccggctgcaccatccgccgcagttcatgtcccagtcgcgctaccttcaagggccgaggtacctgccccgcgacccgctgggtgaaaccgagattgaaagccaggagtctcataacgaggttacgttgctgtcagaggctgtagttcccgcacttagcggcttccctgatgtaaaggagtttgatcaattgatgcagaagtgggtgattcgtgatcaaccaggatggactcgatgctaatatctcattctagctatgttgaggacctgtccatcaagaagcaagataaagcgttgatctatgctaggagggcccgtaacatcagaactgtgttgattgaccccaaagatacggcggtggagtctgctcaatttcggtatgggtctctttggttcaatcaattacctgccttgctaaacaaatcaggttttgggtcaaaaagatgttcaagctccaagctgtgggatctgatgtaagtctcgcctgtcccggtacatatgatctcaatcgatgctgacgagtgatttgttgcgatgtaaagcataggaagatgatctgtcacgagggcaagccggttgcgattcgggaaaaattgttcaagatcctcaccaaggctcatcagcaatgccagcatggtggccgagacaagacatctgctcaggtccgacggatatattcatggtgggaaaatccgtgccgtactatatattatgtacataacatgtctgatgtacagccactgactatctcattagggttcccaaggaactgatctcccgcttcgtcaagatctgcccaacctgtcaggtgcgccgtgggggttctcgattgacgccgcctaattcgcgaagaagctcccccagactggagatggtctctcgatcccccaaacttccgtcgccgccaatctcgcgacgagaatcgacttttgccggtcaacttccccttgacaggacgcaagcagattattttggtcatttacatggtcatggtggctggctagatagtcatcaaaatgtgcaaagtcgctcgaatctaggtaacggagttcgctcgttccagggttccatgggcaatctttcgcactcaattgctggtaccttggattccttctccgccgacctatccattcctccgtcccaattgagttatacaacgggatatgtcccgcacggggctgcacctcagcgagagtattgattggcctttctggtcgacttgtgtggatgttgctttttgagtattatcagggtacactaagtgtgtgctctctaaaagtataccttgccaggagtctctagatatttttgtgcttccttgtgaacgacaagtctgatgagtggcacacacggacagggcaagaagttgattcccatccgctacggggttttgagtgacgccaatattgaatggagggaagggaggaagggatccggaaaaaaaaaggaagaacatgacaagagggaaaaaaaaacacaaaaatacgctgaataatcgaacgactgaattctgaattttgcattgtacaacagtagaccaacgaccgaaaattacagaagttttggcgagaggacctctttgatcgggatatacaacaatcagatatgcacatggtccgcgatcgtattcgatattcgaatgttcagtagccaattgcgggttaattggagcctcgtgtgaccatttctaaatgcatacagatttggcgacatgaaaacatcaattcatagctcccagcgtcggcgcttgaggggggttgcacgggttcaaggcactcggtgcttgtgagataggcgaccacggtgttccaggcaaatataggaccgagtggatcagattcgaaactccatctccgaacctttagaagatcatcaattcctcaactcattcaaacagtagacaggtttttaaacaggaagcgagaacttcttgcccttcaaaaccctgggagaaaaaagcgcataggtcagtgtccgcatcatacgtctgttttttttgtttctttgagcgaattgagcttacttgttgtagtaaatgtaaaagaaatcggagtaaagcaaagtttggatgattccggcgataatgctcacaggctggaaggaacgttggaaggaggcttcggtaaaatagcggaaaatccagttggggatgtagagtgccctatatagtcccagagcaaacagatagtgggtggtgatggtatccgcttccccggttcgttgcagcatgaataattgtggcaatatagcaaccgactccaaccaaatggaaaaagtccagagtatctacatgacgttagtcccgttctttctacaccgtagacagcatggaaccaacctcggagatgcgataatcgcgcggaaacagaatcgcgagcaccgcgctaattccgaggaggtattgaactttgaaagtatcgatattgggatcatgtgtgggtttgtagtcgttgagcatgaggtagatgacgtaggccgaggaaccgataaacagaagcttgaacgtagtgaggtacagggagtcggtgaacgtccagaaaagatctataaggcgcatgagtgattatgatcaacataaagctgacggtgacgtcgaaacctaccaagataccgagtgacaaaaacgagtaggtatagcacctgcgatttgaacgacaacccggaacaactctgcgacgcgccattagttgcaagtcatatgtggccttatagatagcaaaacatacgcttgacgtcttcatcttctgcagaagcatgaagatcgacgccaaatgggagaagtcggcttcaatcgttagtatatcgcgttggttttccattagttttcatgccatacctaataacctgaagatattcattgtgccgaagacggatctgagttaatagtgaatagtgacctaagccaggagagagagggagaaagaaaatagaggaaaggagagagggagacgagtctgagaattgggagactcgaccaaaatagctgagttgttgacacgaaggcaaaaaatggaaggggaacttcgaattacttgcagatcaggtacaatacgtgtatggtatgggtatgtattacacaggacagcgaggaaggcatggaggtacatggaggtacctcttggcaaggcctttcgaagcggcaaaataagtatatatttgtacctacagcgaggaggcggcatcttaagtatctacactatttccctacatatttatagagcgccgaaatgcataatgtcgtcaagtcgtcatattgatacaatcataatcgctacctagacctgcccaataccttgatagtaaaacgccgagatatattgacgttgtagggcaaacttacatttgcctcgctagaacaagtttccacccccaatgctctcatcggccattcgctggagatgaccttcagctagctcgctcttaagagcacatattgagctttcacgatcgagtcgatcccagtctcgaagttccgctcgcttggacctctgtgtctctgcgatctgctcaagtagtttttctttgtcgacatcaagctgagctaaccgcttctccacagcaggatctagaagcgacggaagactccgaccttccggcatgatagtacatagccccgcaagatggttgatccccctctgagccaatggttgagtcacacatggagtgccgggttgccgggaagttggatgtcggtaactgccacctagtaccggagatgagaaagaagcgcgaggacctgctggtggagcttgcgaaggtgcaacaggcccgcgacgtaccggcggtgaccccgtccaagcttcacgtgggccaggtccgcgacgaggacgagtcggcgcggatagtaaagagacatgcggaggaccacgatgttggttagatggcggcctaggtccctgataaggtcctgatggcgggagtggaagtgggcttgcactgtgatttttcggttgagtcgggatgttgccaccaaccctggtcccacttgtctgggattctctctctggaatcgaaaaaggcgaaggattgccaattggtgctcggtcctcatgatctgggcgttgctgtgtgtgaaaaggctccgtatcgtaggtctgatcccggtgcggagatcgaccttggggtttcgacgaccgttgcaagggtaccggggagcgaatcggcgaccgactacgagctttttcgggagccacaacaggcttttctatagccgacgatgaaagtcgagatatcagggcgggttgtgaggccaaggcttgtgcaggtgaaacatctcgtttcgccacatcacgagagtggcctcgatgcgatacatgaattgggctctgtggcaacaagccttctggctgtgctctcggagaggaagctcgggggggtttgtcaatattcaagacagcagaaccatctcgtctcgcggatcggaagacttggcttccaggggttgtatcgcgcattcgtctagggctgttgcgagcacgggatgcgttgcgtgatctgccatcactgtagggcgatttcgagcgccatttttggggcggtgatctgatcctgtcatctcttctgggcgagaatcttcttggtggagatcgtcgtctttcgtaggggggtgggccaaagtttctccccggaggagtacgtgagcgtcgccggtatggcggtggtgaccgactccgtacgcgcccgtaccctctatttgctgacggtacccaagtgtcggctcgtggtcgaggagggcttcggtttcgtggtggcgaacgccggtgacgaatttcatacccccgggaaggggaacgaccgtttctctcggcgggacgatagctttctccacctcttcgttcatcaaatctagggaaatacttagaaactttctttcaaaacgtttggatacgccaacgaaccttctgcgatcccagtccattctggcacggagaatatggatattagaggaggtgagatgaggttcaaagtattctgggttctccgtctcctggggagaagggtgaaagtagatagatagtataaggaattgaagggtcgaatcgcggtagatggaaggaccaagctaaaccccttttagaatcagttcccgtgactggggctcgatatatgtacatacataccaaaactacgcaagatgcttggaatactatttatataaatctacaaagtactccccttgaagtcgcatagattaatcaataagaataagaaatttcattcagaactaaccatacattaaaggctagaaactttccttgcaacctagagtatgaaccaaagcagccaaactccaatgctcatcatgaaaagaagcacacccgggaacccctaaagaaaaaaaatagaaaatcacagtaaaagaagcatccttaatgctttccccgtctctcctcttcctttcggaatcttttgcggtgctcctgtgcaatcatatcactcaagtcctcctggaaaccccagttcggtggattctgctgctgcctctgtgactcgtacatgctctggaggctctctttgctgagaccatcgccagattgaattgcatccaagttgacagacacttcaacatctccaggcttcttgcgtttccgactttggtcatctgcaccaagaacaggaggcttgcctgttgttccgctaaggtcatatgccctatcacccccgaaaaagccttccacgttcgtttgtttctcgggtatgacttgataagcactccgagggtgaatagattcctcggtatcggtaccacgatggtgtttgcgcacatcaaactctccggaaacattctcggcgccaacaaattcagatgggactgccgattcgattccactagcggtttccatgccactaggagaacgagcccctgcacccacgccaccttcgtcactttcttcttcttcgtgttcatcgtcgtcctcctcggcttcactctcctcctctgactcctctgattcgtgtaattctccccaaagctctttttcaaccggctctccttgttgggcatgttgttgaggctgtaaaacgccgaagatatcacctccgaatagggggcggttgtgttcatcgacaggtggctttccataacccccaggctgatagccccacgacgcgccgggtggaggcggcgcattgaggccggggatcttcagcgctgggtaggaagacgggggaccatgtcgctgctggttgacaagccacgggggagggcctcccggggtcataccaagagcgtcctttaactcatcgctcaattcaccaggtcggagatgcttgagattggtctcgtattctttgccctcataatagatttcaccgtaacgagtcagttctggcttggtttggaaacggaaaaatgcctcgtaaagcttctggtaatcgatgtccagcttgcccatctttggctgtactctttcccgttgcttctgcttcaaacttgactgctcctgcttctctaaagcggcgtcgcgcatttcagatattcccgtctcctgtatgaattttgggagagcgaacggtgccttctccactccccgtttggatgagagatactctcgtttgagcgaccagtgggagggtaccggaaccacattgcgatgggctttaatgtgaacgaggagtcgaggatcagaggcagatgtatctgtccattccacaatctcaggctttcgtaccattgctttgagttcagcaacggatagcttgttcatttccttccgcttctttttggagatcttgggctcgctatcttgctcttcgtcgggtatttcatcaccatcaaagaagacctcgggtttatcagcctccttcgatgaattgtcgttcactgtctcgtcgaattttccggcaacacctttgtacatttcccatagcggatcggttgggtcaggaagcaggtcagtgttggtatcagctggtgcatcttgagcagtagccactggcgaagatgacagttctcgtgcgatggtgttttcaatggaatttgtagtctttgtagcagtgttagcattgtatcggccacggctgagaggtttcgagggatatatatgtcttacctcggctttctgggcctttttcttggctcttctgagctggttcttgctcaatttcatggtcgctggaaggtttggcaaccgctcaattaacgcggtgccgagaattaacgcggtgccaagcggagaatattccggagagacgtggtactggcagcttggttcaagtgcgtgcaagggataaactcagctagcgaaagacaatggagtgggggacaaggttgaaaacaaaatagttatatggcatctcaattgccatcacgtgcattcacccgatgccttaccgcctatatctttctacactaggtacaaatctcacgtggtcggagaggttttgtcatttgttacgcaattcatgacctagttaactaactatactttattatatagttaatatatgtttagtccagctacttgtatagaatattcagtattgtgctaataacctagtagacactaaaaaaaggtaaaaaaaaaagataatattgtacaaaatggggggaacaagctctatcagcaaagatagcaaataagttcctaaacaatcctcacttaaagcaaaggatctacatagatttgcgaagctgtagttcactagcccagccacatcatagaaacataatccgattatagaatgtatgccagtattgatgtgaatggtgcaatgttgagcttagcagagccctggaagttaagcagacagtctacttcttcttctttgcggatcttgattctgttcgagtcttagattttgatcatgtcaagtaaccattaggtgtaggagcaaattacctgcagcagttcgcttcttcttcggccggcccttccctcgcaatttggcactatgaatcaaatgtttagtaggagtgtatgtgacatgggacaacaattcttacatctgaatagcttcttctctgtcatcttcggcttcgtcaaatgttgtcaatccaagaggcttataagtgttttgtaaatcttggaaagacacagtctgcttaggataccaggctgcaagcgctggtccacgcaaccgctgtctcaagatcttgtttccaagtcgaagccgttgcgggttgaaattaagagagaatatgcggcattgggtctagaggaattgtcagttagtgaatgtcggcacagcgcaatggaaaggtggatgaaccttaactagatccaagatccgacttgacgccattttgctttctcaaaggttcagaacaatcatatgcaagaagaagggtgaagcagctgttcacagcgacttggtagacaggtgtcattgaacttcggtagcaacagaaagtttgaccggtggtcatgtgacctcccgaagtataccgcctacatatcatccatgtttttacctccaggcgcaagaggaaaactagactaagactgaacaggggctacaacagtcgatatgtctcaagccaaagagatagaaaatccagcaatcttaaaaaggccagtggtagatcttaaaagatcatcatctgtctttgggtcagatggcacacaaaactcacaaaagcggcctaaggtgaataccatgttctcatcccactgagcgaattcctgttgattcgagtgaccttctaacatctacttgcataaaggttcaaccatcaagtcggccatcggatactaagtcctcctctattattgtcagtcacagcatgggcaagtccagcaaccattctcgtatacttcttctacaacgccttgttcgagaaatatcaaccgattctgatctcgctggtgttgactcggagattttggatgcaatttcgaggctggatgacacgtttcgtacgacgaagagtcaattgccttccaaagatccttccatagctggtgaggtcccaatatcacgccacccagatcacagtcccaagtcggtcaatggctcgtttggccttgagctcccccctatcatggatcacaagcttgaacttgctgtctttacccatccagctcttagcaacaataaaaacacgacctacgaccgactcgagatcctaggcgatgcatacattgagctgattgcaaccaaactcgtctgggagagatttccagatttaccagcaggtcggatatcacagattcgggagatgcttgttaagaatgagacactttcgggcttcgcagaaagctttggtttggaccgcagggttgctgtgccgccaaactacaacaccccatcaaagcgatggaccaaaacaaaaggcgacgtattcgaagcctacgtcgcggcaatcatactatccgatcctgtctctggctatgaagtagccgagcattggctagcaggtttatgggtgccaattctcaagaacttgggacatcagaaaggggagttacgctccaaggaggctcttgctaagaaaattatggggaaaagagtcaagcttgaatacatagaggagcgtccatcaattcagcagaagggcggtacacaaaatttcttcgtcgcgttatatctcactgggtggggatgggacaaaaggtttctgggttccggtcagggtttgagtaaagcagctgcaggtgacgaagcagcgaaaaagacgttgctgaacacgcctctgattcttgagatcatatcagcgaaagagtcatgggagtctaactcttaaaatcttggtcatatttcacgattgatcgggtcggtttcttcaagttactagatctcgcattccatttcttactcaataaaatagcacccgatgagtccacccttgcactgtgcagcttaaagacgttcctagaaccccattggcttcggcggagaatatgtaaatccgagattgattctccccaaggaatcaatccttctcacctctatccgtctcttgacctctaccagagacggctggggaagccgcgcaagccgaatgatatctatatcatagaatgacgagtatggaatttgtcttcgtcaacgttcagaagccaagtgacgcccttcagctcgccaaagcacccgaggtccgatctcacgtgacgcgttatcaatggaagcaatctgcgcgtcgagacaagcgaacccgaaggatcttgctaggtgttgcacaggatgtgaatggagctggatttcaaaacggcctccggctcgattcttttaaaccggaaccaccgtcgatattgcctcaaataggcggactccgagttgaccctttccagtcatatcctatctcgggtcaaccgtggactccgctgctggtcgatcactgtaagttactttttgaacttgatttaaacaaggtggactttgttaatatggtaagacttgatacacatggcagttgatattcccgagcttgacctacctggaaaccacggcctcttgaggaccacttggtttccattggtgatgaccgagcccgctttattctctgtcattcttcttcttgctgcatcgcattatgcctccctacaggtcgatcctagcagtatgaaaatcgatctcctcggttttcgttatacagctgtactatccatcaatcgcagtcttgatgctcggcagcccgagaatgtacatgacgctttgataggagccatagcaaagatggcaagctatgaggccatgttcggcagtctcgagaattataatatccacatgcagggtctcgcacgactcattagtttacgagggggtcttacttcactaggcttgaatggcttgctccagcggatggtgatttggatcgactgtaatgccgctttcttacatggatcggcaatgtatttccttatggatacctctgtgccgggtgaatctccgccatacccgaatcctggtcaattcctcgggagctcgtgatacccagcagagtctaaatcatttcattgaaccaatcaaaaccccgcatatccatcggtatgatgtcatgatctcatctatcatatatagttcatgcatttcctaaataggatatcacatctaaagcccgccccacatctcttggtggatatgccccacagatttccgatttcagataacacatactaatgcgggatctgggacatatgtactgtatactacatcataggtccagtcgctgaacatataaggaatgaacacctcacggggaaagatcaaatctctatcaatcggcattactcccccagctactccctatcttcaccacaaaaatggctctcactggtaaagtcgcccttatcaccggcggtgtcaagaatcttggagctgcaagtgcccttgaactagctagtgtcggcgccaatcttgctcttcactaccattcgtccagtggcgaaaaggatgcagctgcgctcaaagccacactccaggaaaagaacccttcgatcaaggtttccttctaccagggtgatctcacctctgcagctgcagtgacaaaattgtttgaagatgttattcgtgactttggccatgtcgatattgtggtcaacacagtcgggaaggtgctgaagaagcctatcacggaaatcagcgaggacgaatatgacacaatgttcgcgtaagtctttggagaagaacatcacgagctctctaggcatggttaacaagactttttttctagggtgaactccaaaactgcgttcttcgtcctaaaggaagccgctgctcatgtgaccgatggtggaaagatcatcagcattgtcactgcgctcctaggagcgtttactggctactatacttcttacgccggcagcaaagctcctgtcgagcactttactcggtattttgccagtctagtgtccattcaggtccttggctaacatctatcataggggtgtttgcaaggagcttcagtctcgcaggatcagtgtgaacaatgtcgccccgggaccaatggatacacgtgagtttactactacaaataatcaagggatacgtttcgttcaaacgatctaacgagatgttaccaacagctttcttctatccccaggaatctccagaagctgtggaattccacaaagcaaatggcatgggcaaccgtcttaccatggtagaggacattgctcctatcattcgcttcctctgtactgatggtgcgtggattaccggccagaccattttcgccaatggtggatatactactcgttgattgagtctttaaattctcatggcaaggctcctggtagatcgaattacaattgaatggggttggggagggggcacagccctattgtattttcttcccttccaagcttctctcgatcatataatgcaaagggagaatgtttgttgaatagaaagcctcattatttcttcactgatgataaattataatatgatattttaaaaatgttcctgtgtagtgaatacgcgcggggccgtatagtaacgaataagtggaggactgttttctatggtacgagtagtaggatactagactaaagagtaaaatgagtataattattaggccttgataggtgctgtagtacctggggaattttggtactattatccggtgctgcggcacctagtactacagtacggaggtccatcccaaaagttcttgtctcactcattttcacgctaatataaaactagtcctagtggcggagaggagatcatgtgaccgggtgctctctctactgggtcgaaaaaaatagaaatctagttggtaaaaaagtattcgctaagaaacggtagaaaagatccagccggtagaaaaaaactatctatcttaaccatataaaggacatgcctgggcgcatgtctcttccgcttggccaaaagaccattatgtcagcccttgcgctaatattattagaacctgtcaggaccctagtacaaagaaggctgatacctgaagtatttgtcaggaccccagtactgagaaggctgatacctgaagtatttgacagaaaaacggtagtaaggcgaatgtatatatggtagaaaaatctcaatcaattctctaattctctaaaaatgataatagtccggaaaacatgacaatctgatagacaacttagtaatcaaataaacaaaataaaatgaaaggatgttttttgggcagaaaaccttctaagttcgtttttctatagaaaaaccagcctggttagttatatgacctaactatattagggataaaaaataatagtatttatccnnnnnnnnnnnnnnnnnnnnnnnnnnnnnnnnnnnnnnnnnnnnnnnnnnnnnnnnnnnnnnnnnnnnnnnnnnnnnnnnnnnnnnnnnnnnnnnnnnnnnnnnnnnnnnnnnnnnnnnnnnnnnnnnnnnnnnnnnnnnnnnnnnnnnnnnnnnnnnnnnnnnnnnnnnnnnnnnnnnnnnnnnnnnnnnnnnnnnnnnnnnnnnnnnnnnnnnnnnnnnnnnnnnnnnnnnnnnnnnnnnnnnnnnnnnnnnnnnnnnnnnnnnnnnnnnnnnnnnnnnnnnnnnnnnnnnnnnnnnnnnnnnnnnnnnnnnnnnnnnnnnnnnnnnnnnnnnnnnnnnnnnnnnnnnnnnnnnnnnnnnnnnnnnnnnnnnnnnnnnnnnnnnnnnnnnnnnnnnnnnnnnnnnnnnnnnnnnnnnnnnnnnnnnnnnnnnnnnnnnnnnnnnnnnnnnnnnnnnnnnnnnnnnnnnnnnnnnnnnnnnnnnnnnnnnnnnnnnnnnnnnnnnnnnnnnnnnnnnnnnnnnnnnnnnnnnnnnnnnnnnnnnnnnnnnnnnnnnnnnnnnnnnnnnnnnnnnnnnnnnnnnnnnnnnnnnnnnnnnnnnnnnnnnnnnnnnnnnnnnnnnnnnnnnnnnnnnnnnnnnnnnnnnnnnnnnnnnnnnnnnnnnnnnnnnnnnnnnnnnnnnnnnnnnnnnnnnnnnnnnnnnnnnnnnnnnnnnnnnnnnnnnnnnnnnnnnnnnnnnnnnnnnnnnnnnnnnnnnnnnnnnnnnnnnnnnnnnnnnnnnnnnnnnnnnnnnnnnnnnnnnnnnnnnnnnnnnnnnnnnnnnnnnnnnnnnnnnnnnnnnnnnnnnnnnnnnnnnnnnnnnnnnnnnnnnnnnnnnnnnnnnnnnnnnnnnnnnnnnnnnnnnnnnnnnnnnnnnnnnnnnnnnnnnnnnnnnnnnnnnnnnnnnnnnnnnnnnnnnnnnnnnnnnnnnnnnnnnnnnnnnnnnnnnnnnnnnnnnnnnnnnnnnnnnnnnnnnnnnnnnnnnnnnnnnnnnnnnnnnnnnnnnnnnnnnnnnnnnnnnnnnnnnnnnnnnnnnnnnnnnnnnnnnnnnnnnnnnnnnnnnnnnnnnnnnnnnnnnnnnnnnnnnnnnnnnnnnnnnnnnnnnnnnnnnnnnnnnnnnnnnnnnnnnnnnnnnnnnnnnnnnnnnnnnnnnnnnnnnnnnnnnnnnnnnnnnnnnnnnnnnnnnnnnnnnnnnnnnnnnnnnnnnnnnnnnnnnnnnnnnnnnnnnnnnnnnnnnnnnnnnnnnnnnnnnnnnnnnnnnnnnnnnnnnnnnnnnnnnnnnnnnnnnnnnnnnnnnnnnnnnnnnnnnnnnnnnnnnnnnnnnnnnnnnnnnnnnnnnnnnnnnnnnnnnnnnnnnnnnnnnnnnnnnnnnnnnnnnnnnnnnnnnnnnnnnnnnnnnnnnnnnnnnnnnnnnnnnnnnnnnnnnnnnnnnnnnnnnnnnnnnnnnnnnnnnnnnnnnnnnnnnnnnnnnnnnnnnnnnnnnnnnnnnnnnnnnnnnnnnnnnnnnnnnnnnnnnnnnnnnnnnnnnnnnnnnnnnnnnnnnnnnnnnnnnnnnnnnnnnnnnnnnnnnnnnnnnnnnnnnnnnnnnnnnnnnnnnnnnnnnnnnnnnnnnnnnnnnnnnnnnnnnnnnnnnnnnnnnnnnnnnnnnnnnnnnnnnnnnnnnnnnnnnnnnnnnnnnnnnnnnnnnnnnnnnnnnnnnnnnnnnnnnnnnnnnnnnnnnnnnnnnnnnnnnnnnnnnnnnnnnnnnnnnnnnnnnnnnnnnnnnnnnnnnnnnnnnnnnnnnnnnnnnnnnnnnnnnnnnnnnnnnnnnnnnnnnnnnnnnnnnnnnnnnnnnnnnnnnnnnnnnnnnnnnnnnnnnnnnnnnnnnnnnnnnnnnnnnnnnnnnnnnnnnnnnnnnnnnnnnnnnnnnnnnnnnnnnnnnnnnnnnnnnnnnnnnnnnnnnnnnnnnnnnnnnnnnnnnnnnnnnnnnnnnnnnnnnnnnnnnnnnnnnnnnnnnnnnnnnnnnnnnnnnnnnnnnnnnnnnnnnnnnnnnnnnnnnnnnnnnnnnnnnnnnnnnnnnnnnnnnnnnnnnnnnnnnnnnnnnnnnnnnnnnnnnnnnnnnnnnnnnnnnnnnnnnnnnnnnnnnnnnnnnnnnnnnnnnnnnnnnnnnnnnnnnnnnnnnnnnnnnnnnnnnnnnnnnnnnnnnnnnnnnnnnnnnnnnnnnnnnnnnnnnnnnnnnnnnnnnnnnnnnnnnnnnnnnnnnnnnnnnnnnnnnnnnnnnnnnnnnnnnnnnnnnnnnnnnnnnnnnnnnnnnnnnnnnnnnnnnnnnnnnnnnnnnnnnnnnnnnnnnnnnnnnnnnnnnnnnnnnnnnnnnnnnnnnnnnnnnnnnnnnnnnnnnnnnnnnnnnnnnnnnnnnnnnnnnnnnnnnnnnnnnnnnnnnnnnnnnnnnnnnnnnnnnnnnnnnnnnnnnnnnnnnnnnnnnnnnnnnnnnnnnnnnnnnnnnnnnnnnnnnnnnnnnnnnnnnnnnnnnnnnnnnnnnnnnnnnnnnnnnnnnnnnnnnnnnnnnnnnnnnnnnnnnnnnnnnnnnnnnnnnnnnnnnnnnnnnnnnnnnnnnnnnnnnnnnnnnnnnnnnnnnnnnnnnnnnnnnnnnnnnnnnnnnnnnnnnnnnnnnnnnnnnnnnnnnnnnnnnnnnnnnnnnnnnnnnnnnnnnnnnnnnnnnnnnnnnnnnnnnnnnnnnnnnnnnnnnnnnnnnnnnnnnnnnnnnnnnnnnnnnnnnnnnnnnnnnnnnnnnnnnnnnnnnnnnnnnnnnnnnnnnnnnnnnnnnnnnnnnnnnnnnnnnnnnnnnnnnnnnnnnnnnnnnnnnnnnnnnnnnnnnnnnnnnnnnnnnnnnnnnnnnnnnnnnnnnnnnnnnnnnnnnnnnnnnnnnnnnnnnnnnnnnnnnnnnnnnnnnnnnnnnnnnnnnnnnnnnnnnnnnnnnnnnnnnnnnnnnnnnnnnnnnnnnnnnnnnnnnnnnnnnnnnnnnnnnnnnnnnnnnnnnnnnnnnnnnnnnnnnnnnnnnnnnnnnnnnnnnnnnnnnnnnnnnnnnnnnnnnnnnnnnnnnnnnnnnnnnnnnnnnnnnnnnnnnnnnnnnnnnnnnnnnnnnnnnnnnnnnnnnnnnnnnnnnnnnnnnnnnnnnnnnnnnnnnnnnnnnnnnnnnnnnnnnnnnnnnnnnnnnnnnnnnnnnnnnnnnnnnnnnnnnnnnnnnnnnnnnnnnnnnnnnnnnnnnnnnnnnnnnnnnnnnnnnnnnnnnnnnnnnnnnnnnnnnnnnnnnnnnnnnnnnnnnnnnnnnnnnnnnnnnnnnnnnnnnnnnnnnnnnnnnnnnnnnnnnnnnnnnnnnnnnnnnnnnnnnnnnnnnnnnnnnnnnnnnnnnnnnnnnnnnnnnnnnnnnnnnnnnnnnnnnnnnnnnnnnnnnnnnnnnnnnnnnnnnnnnnnnnnnnnnnnnnnnnnnnnnnnnnnnnnnnnnnnnnnnnnnnnnnnnnnnnnnnnnnnnnnnnnnnnnnnnnnnnnnnnnnnnnnnnnnnnnnnnnnnnnnnnnnnnnnnnnnnnnnnnnnnnnnnnnnnnnnnnnnnnnnnnnnnnnnnnnnnnnnnnnnnnnnnnnnnnnnnnnnnnnnnnnnnnnnnnnnnnnnnnnnnnnnnnnnnnnnnnnnnnnnnnnnnnnnnnnnnnnnnnnnnnnnnnnnnnnnnnnnnnnnnnnnnnnnnnnnnnnnnnnnnnnnnnnnnnnnnnnnnnnnnnnnnnnnnnnnnnnnnnnnnnnnnnnnnnnnnnnnnnnnnnnnnnnnnnnnnnnnnnnnnnnnnnnnnnnnnnnnnnnnnnnnnnnnnnnnnnnnnnnnnnnnnnnnnnnnnnnnnnnnnnnnnnnnnnnnnnnnnnnnnnnnnnnnnnnnnnnnnnnnnnnnnnnnnnnnnnnnnnnnnnnnnnnnnnnnnnnnnnnnnnnnnnnnnnnnnnnnnnnnnnnnnnnnnnnnnnnnnnnnnnnnnnnnnnnnnnnnnnnnnnnnnnnnnnnnnnnnnnnnnnnnnnnnnnnnnnnnnnnnnnnnnnnnnnnnnnnnnnnnnnnnnnnnnnnnnnnnnnnnnnnnnnnnnnnnnnnnnnnnnnnnnnnnnnnnnnnnnnnnnnnnnnnnnnnnnnnnnnnnnnnnnnnnnnnnnnnnnnnnnnnnnnnnnnnnnnnnnnnnnnnnnnnnnnnnnnnnnnnnnnnnnnnnnnnnnnnnnnnnnnnnnnnnnnnnnnnnnnnnnnnnnnnnnnnnnnnnnnnnnnnnnnnnnnnnnnnnnnnnnnnnnnnnnnnnnnnnnnnnnnnnnnnnnnnnnnnnnnnnnnnnnnnnnnnnnnnnnnnnnnnnnnnnnnnnnnnnnnnnnnnnnnnnnnnnnnnnnnnnnnnnnnnnnnnnnnnnnnnnnnnnnnnnnnnnnnnnnnnnnnnnnnnnnnnnnnnnnnnnnnnnnnnnnnnnnnnnnnnnnnnnnnnnnnnnnnnnnnnnnnnnnnnnnnnnnnnnnnnnnnnnnnnnnnnnnnnnnnnnnnnnnnnnnnnnnnnnnnnnnnnnnnnnnnnnnnnnnnnnnnnnnnnnnnnnnnnnnnnnnnnnnnnnnnnnnnnnnnnnnnnnnnnnnnnnnnnnnnnnnnnnnnnnnnnnnnnnnnnnnnnnnnnnnnnnnnnnnnnnnnnnnnnnnnnnnnnnnnnnnnnnnnnnnnnnnnnnnnnnnnnnnnnnnnnnnnnnnnnnnnnnnnnnnnnnnnnnnnnnnnnnnnnnnnnnnnnnnnnnnnnnnnnnnnnnnnnnnnnnnnnnnnnnnnnnnnnnnnnnnnnnnnnnnnnnnnnnnnnnnnnnnnnnnnnnnnnnnnnnnnnnnnnnnnnnnnnnnnnnnnnnnnnnnnnnnnnnnnnnnnnnnnnnnnnnnnnnnnnnnnnnnnnnnnnnnnnnnnnnnnnnnnnnnnnnnnnnnnnnnnnnnnnnnnnnnnnnnnnnnnnnnnnnnnnnnnnnnnnnnnnnnnnnnnnnnnnnnnnnnnnnnnnnnnnnnnnnnnnnnnnnnnnnnnnnnnnnnnnnnnnnnnnnnnnnnnnnnnnnnnnnnnnnnnnnnnnnnnnnnnnnnnnnnnnnnnnnnnnnnnnnnnnnnnnnnnnnnnnnnnnnnnnnnnnnnnnnnnnnnnnnnnnnnnnnnnnnnnnnnnnnnnnnnnnnnnnnnnnnnnnnnnnnnnnnnnnnnnnnnnnnnnnnnnnnnnnnnnnnnnnnnnnnnnnnnnnnnnnnnnnnnnnnnnnnnnnnnnnnnnnnnnnnnnnnnnnnnnnnnnnnnnnnnnnnnnnnnnnnnnnnnnnnnnnnnnnnnnnnnnnnnnnnnnnnnnnnnnnnnnnnnnnnnnnnnnnnnnnnnnnnnnnnnnnnnnnnnnnnnnnnnnnnnnnnnnnnnnnnnnnnnnnnnnnnnnnnnnnnnnnnnnnnnnnnnnnnnnnnnnnnnnnnnnnnnnnnnnnnnnnnnnnnnnnnnnnnnnnnnnnnnnnnnnnnnnnnnnnnnnnnnnnnnnnnnnnnnnnnnnnnnnnnnnnnnnnnnnnnnnnnnnnnnnnnnnnnnnnnnnnnnnnnnnnnnnnnnnnnnnnnnnnnnnnnnnnnnnnnnnnnnnnnnnnnnnnnnnnnnnnnnnnnnnnnnnnnnnnnnnnnnnnnnnnnnnnnnnnnnnnnnnnnnnnnnnnnnnnnnnnnnnnnnnnnnnnnnnnnnnnnnnnnnnnnnnnnnnnnnnnnnnnnnnnnnnnnnnnnnnnnnnnnnnnnnnnnnnnnnnnnnnnnnnnnnnnnnnnnnnnnnnnnnnnnnnnnnnnnnnnnnnnnnnnnnnnnnnnnnnnnnnnnnnnnnnnnnnnnnnnnnnnnnnnnnnnnnnnnnnnnnnnnnnnnnnnnnnnnnnnnnnnnnnnnnnnnnnnnnnnnnnnnnnnnnnnnnnnnnnnnnnnnnnnnnnnnnnnnnnnnnnnnnnnnnnnnnnnnnnnnnnnnnnnnnnnnnnnnnnnnnnnnnnnnnnnnnnnnnnnnnnnnnnnnnnnnnnnnnnnnnnnnnnnnnnnnnnnnnnnnnnnnnnnnnnnnnnnnnnnnnnnnnnnnnnnnnnnnnnnnnnnnnnnnnnnnnnnnnnnnnnnnnnnnnnnnnnnnnnnnnnnnnnnnnnnnnnnnnnnnnnnnnnnnnnnnnnnnnnnnnnnnnnnnnnnnnnnnnnnnnnnnnnnnnnnnnnnnnnnnnnnnnnnnnnnnnnnnnnnnnnnnnnnnnnnnnnnnnnnnnnnnnnnnnnnnnnnnnnnnnnnnnnnnnnnnnnnnnnnnnnnnnnnnnnnnnnnnnnnnnnnnnnnnnnnnnnnnnnnnnnnnnnnnnnnnnnnnnnnnnnnnnnnnnnnnnnnnnnnnnnnnnnnnnnnnnnnnnnnnnnnnnnnnnnnnnnnnnnnnnnnnnnnnnnnnnnnnnnnnnnnnnnnnnnnnnnnnnnnnnnnnnnnnnnnnnnnnnnnnnnnnnnnnnnnnnnnnnnnnnnnnnnnnnnnnnnnnnnnnnnnnnnnnnnnnnnnnnnnnnnnnnnnnnnnnnnnnnnnnnnnnnnnnnnnnnnnnnnnnnnnnnnnnnnnnnnnnnnnnnnnnnnnnnnnnnnnnnnnnnnnnnnnnnnnnnnnnnnnnnnnnnnnnnnnnnnnnnnnnnnnnnnnnnnnnnnnnnnnnnnnnnnnnnnnnnnnnnnnnnnnnnnnnnnnnnnnnnnnnnnnnnnnnnnnnnnnnnnnnnnnnnnnnnnnnnnnnnnnnnnnnnnnnnnnnnnnnnnnnnnnnnnnnnnnnnnnnnnnnnnnnnnnnnnnnnnnnnnnnnnnnnnnnnnnnnnnnnnnnnnnnnnnnnnnnnnnnnnnnnnnnnnnnnnnnnnnnnnnnnnnnnnnnnnnnnnnnnnnnnnnnnnnnnnnnnnnnnnnnnnnnnnnnnnnnnnnnnnnnnnnnnnnnnnnnnnnnnnnnnnnnnnnnnnnnnnnnnnnnnnnnnnnnnnnnnnnnnnnnnnnnnnnnnnnnnnnnnnnnnnnnnnnnnnnnnnnnnnnnnnnnnnnnnnnnnnnnnnnnnnnnnnnnnnnnnnnnnnnnnnnnnnnnnnnnnnnnnnnnnnnnnnnnnnnnnnnnnnnnnnnnnnnnnnnnnnnnnnnnnnnnnnnnnnnnnnnnnnnnnnnnnnnnnnnnnnnnnnnnnnnnnnnnnnnnnnnnnnnnnnnnnnnnnnnnnnnnnnnnnnnnnnnnnnnnnnnnnnnnnnnnnnnnnnnnnnnnnnnnnnnnnnnnnnnnnnnnnnnnnnnnnnnnnnnnnnnnnnnnnnnnnnnnnnnnnnnnnnnnnnnnnnnnnnnnnnnnnnnnnnnnnnnnnnnnnnnnnnnnnnnnnnnnnnnnnnnnnnnnnnnnnnnnnnnnnnnnnnnnnnnnnnnnnnnnnnnnnnnnnnnnnnnnnnnnnnnnnnnnnnnnnnnnnnnnnnnnnnnnnnnnnnnnnnnnnnnnnnnnnnnnnnnnnnnnnnnnnnnnnnnnnnnnnnnnnnnnnnnnnnnnnnnnnnnnnnnnnnnnnnnnnnnnnnnnnnnnnnnnnnnnnnnnnnnnnnnnnnnnnnnnnnnnnnnnnnnnnnnnnnnnnnnnnnnnnnnnnnnnnnnnnnnnnnnnnnnnnnnnnnnnnnnnnnnnnnnnnnnnnnnnnnnnnnnnnnnnnnnnnnnnnnnnnnnnnnnnnnnnnnnnnnnnnnnnnnnnnnnnnnnnnnnnnnnnnnnnnnnnnnnnnnnnnnnnnnnnnnnnnnnnnnnnnnnnnnnnnnnnnnnnnnnnnnnnnnnnnnnnnnnnnnnnnnnnnnnnnnnnnnnnnnnnnnnnnnnnnnnnnnnnnnnnnnnnnnnnnnnnnnnnnnnnnnnnnnnnnnnnnnnnnnnnnnnnnnnnnnnnnnnnnnnnnnnnnnnnnnnnnnnnnnnnnnnnnnnnnnnnnnnnnnnnnnnnnnnnnnnnnnnnnnnnnnnnnnnnnnnnnnnnnnnnnnnnnnnnnnnnnnnnnnnnnnnnnnnnnnnnnnnnnnnnnnnnnnnnnnnnnnnnnnnnnnnnnnnnnnnnnnnnnnnnnnnnnnnnnnnnnnnnnnnnnnnnnnnnnnnnnnnnnnnnnnnnnnnnnnnnnnnnnnnnnnnnnnnnnnnnnnnnnnnnnnnnnnnnnnnnnnnnnnnnnnnnnnnnnnnnnnnnnnnnnnnnnnnnnnnnnnnnnnnnnnnnnnnnnnnnnnnnnnnnnnnnnnnnnnnnnnnnnnnnnnnnnnnnnnnnnnnnnnnnnnnnnnnnnnnnnnnnnnnnnnnnnnnnnnnnnnnnnnnnnnnnnnnnnnnnnnnnnnnnnnnnnnnnnnnnnnnnnnnnnnnnnnnnnnnnnnnnnnnnnnnnnnnnnnnnnnnnnnnnnnnnnnnnnnnnnnnnnnnnnnnnnnnnnnnnnnnnnnnnnnnnnnnnnnnnnnnnnnnnnnnnnnnnnnnnnnnnnnnnnnnnnnnnnnnnnnnnnnnnnnnnnnnnnnnnnnnnnnnnnnnnnnnnnnnnnnnnnnnnnnnnnnnnnnnnnnnnnnnnnnnnnnnnnnnnnnnnnnnnnnnnnnnnnnnnnnnnnnnnnnnnnnnnnnnnnnnnnnnnnnnnnnnnnnnnnnnnnnnnnnnnnnnnnnnnnnnnnnnnnnnnnnnnnnnnnnnnnnnnnnnnnnnnnnnnnnnnnnnnnnnnnnnnnnnnnnnnnnnnnnnnnnnnnnnnnnnnnnnnnnnnnnnnnnnnnnnnnnnnnnnnnnnnnnnnnnnnnnnnnnnnnnnnnnnnnnnnnnnnnnnnnnnnnnnnnnnnnnnnnnnnnnnnnnnnnnnnnnnnnnnnnnnnnnnnnnnnnnnnnnnnnnnnnnnnnnnnnnnnnnnnnnnnnnnnnnnnnnnnnnnnnnnnnnnnnnnnnnnnnnnnnnnnnnnnnnnnnnnnnnnnnnnnnnnnnnnnnnnnnnnnnnnnnnnnnnnnnnnnnnnnnnnnnnnnnnnnnnnnnnnnnnnnnnnnnnnnnnnnnnnnnnnnnnnnnnnnnnnnnnnnnnnnnnnnnnnnnnnnnnnnnnnnnnnnnnnnnnnnnnnnnnnnnnnnnnnnnnnnnnnnnnnnnnnnnnnnnnnnnnnnnnnnnnnnnnnnnnnnnnnnnnnnnnnnnnnnnnnnnnnnnnnnnnnnnnnnnnnnnnnnnnnnnnnnnnnnnnnnnnnnnnnnnnnnnnnnnnnnnnnnnnnnnnnnnnnnnnnnnnnnnnnnnnnnnnnnnnnnnnnnnnnnnnnnnnnnnnnnnnnnnnnnnnnnnnnnnnnnnnnnnnnnnnnnnnnnnnnnnnnnnnnnnnnnnnnnnnnnnnnnnnnnnnnnnnnnnnnnnnnnnnnnnnnnnnnnnnnnnnnnnnnnnnnnnnnnnnnnnnnnnnnnnnnnnnnnnnnnnnnnnnnnnnnnnnnnnnnnnnnnnnnnnnnnnnnnnnnnnnnnnnnnnnnnnnnnnnnnnnnnnnnnnnnnnnnnnnnnnnnnnnnnnnnnnnnnnnnnnnnnnnnnnnnnnnnnnnnnnnnnnnnnnnnnnnnnnnnnnnnnnnnnnnnnnnnnnnnnnnnnnnnnnnnnnnnnnnnnnnnnnnnnnnnnnnnnnnnnnnnnnnnnnnnnnnnnnnnnnnnnnnnnnnnnnnnnnnnnnnnnnnnnnnnnnnnnnnnnnnnnnnnnnnnnnnnnnnnnnnnnnnnnnnnnnnnnnnnnnnnnnnnnnnnnnnnnnnnnnnnnnnnnnnnnnnnnnnnnnnnnnnnnnnnnnnnnnnnnnnnnnnnnnnnnnnnnnnnnnnnnnnnnnnnnnnnnnnnnnnnnnnnnnnnnnnnnnnnnnnnnnnnnnnnnnnnnnnnnnnnnnnnnnnnnnnnnnnnnnnnnnnnnnnnnnnnnnnnnnnnnnnnnnnnnnnnnnnnnnnnnnnnnnnnnnnnnnnnnnnnnnnnnnnnnnnnnnnnnnnnnnnnnnnnnnnnnnnnnnnnnnnnnnnnnnnnnnnnnnnnnnnnnnnnnnnnnnnnnnnnnnnnnnnnnnnnnnnnnnnnnnnnnnnnnnnnnnnnnnnnnnnnnnnnnnnnnnnnnnnnnnnnnnnnnnnnnnnnnnnnnnnnnnnnnnnnnnnnnnnnnnnnnnnnnnnnnnnnnnnnnnnnnnnnnnnnnnnnnnnnnnnnnnnnnnnnnnnnnnnnnnnnnnnnnnnnnnnnnnnnnnnnnnnnnnnnnnnnnnnnnnnnnnnnnnnnnnnnnnnnnnnnnnnnnnnnnnnnnnnnnnnnnnnnnnnnnnnnnnnnnnnnnnnnnnnnnnnnnnnnnnnnnnnnnnnnnnnnnnnnnnnnnnnnnnnnnnnnnnnnnnnnnnnnnnnnnnnnnnnnnnnnnnnnnnnnnnnnnnnnnnnnnnnnnnnnnnnnnnnnnnnnnnnnnnnnnnnnnnnnnnnnnnnnnnnnnnnnnnnnnnnnnnnnnnnnnnnnnnnnnnnnnnnnnnnnnnnnnnnnnnnnnnnnnnnnnnnnnnnnnnnnnnnnnnnnnnnnnnnnnnnnnnnnnnnnnnnnnnnnnnnnnnnnnnnnnnnnnnnnnnnnnnnnnnnnnnnnnnnnnnnnnnnnnnnnnnnnnnnnnnnnnnnnnnnnnnnnnnnnnnnnnnnnnnnnnnnnnnnnnnnnnnnnnnnnnnnnnnnnnnnnnnnnnnnnnnnnnnnnnnnnnnnnnnnnnnnnnnnnnnnnnnnnnnnnnnnnnnnnnnnnnnnnnnnnnnnnnnnnnnnnnnnnnnnnnnnnnnnnnnnnnnnnnnnnnnnnnnnnnnnnnnnnnnnnnnnnnnnnnnnnnnnnnnnnnnnnnnnnnnnnnnnnnnnnnnnnnnnnnnnnnnnnnnnnnnnnnnnnnnnnnnnnnnnnnnnnnnnnnnnnnnnnnnnnnnnnnnnnnnnnnnnnnnnnnnnnnnnnnnnnnnnnnnnnnnnnnnnnnnnnnnnnnnnnnnnnnnnnnnnnnnnnnnnnnnnnnnnnnnnnnnnnnnnnnnnnnnnnnnnnnnnnnnnnnnnnnnnnnnnnnnnnnnnnnnnnnnnnnnnnnnnnnnnnnnnnnnnnnnnnnnnnnnnnnnnnnnnnnnnnnnnnnnnnnnnnnnnnnnnnnnnnnnnnnnnnnnnnnnnnnnnnnnnnnnnnnnnnnnnnnnnnnnnnnnnnnnnnnnnnnnnnnnnnnnnnnnnnnnnnnnnnnnnnnnnnnnnnnnnnnnnnnnnnnnnnnnnnnnnnnnnnnnnnnnnnnnnnnnnnnnnnnnnnnnnnnnnnnnnnnnnnnnnnnnnnnnnnnnnnnnnnnnnnnnnnnnnnnnnnnnnnnnnnnnnnnnnnnnnnnnnnnnnnnnnnnnnnnnnnnnnnnnnnnnnnnnnnnnnnnnnnnnnnnnnnnnnnnnnnnnnnnnnnnnnnnnnnnnnnnnnnnnnnnnnnnnnnnnnnnnnnnnnnnnnnnnnnnnnnnnnnnnnnnnnnnnnnnnnnnnnnnnnnnnnnnnnnnnnnnnnnnnnnnnnnnnnnnnnnnnnnnnnnnnnnnnnnnnnnnnnnnnnnnnnnnnnnnnnnnnnnnnnnnnnnnnnnnnnnnnnnnnnnnnnnnnnnnnnnnnnnnnnnnnnnnnnnnnnnnnnnnnnnnnnnnnnnnnnnnnnnnnnnnnnnnnnnnnnnnnnnnnnnnnnnnnnnnnnnnnnnnnnnnnnnnnnnnnnnnnnnnnnnnnnnnnnnnnnnnnnnnnnnnnnnnnnnnnnnnnnnnnnnnnnnnnnnnnnnnnnnnnnnnnnnnnnnnnnnnnnnnnnnnnnnnnnnnnnnnnnnnnnnnnnnnnnnnnnnnnnnnnnnnnnnnnnnnnnnnnnnnnnnnnnnnnnnnnnnnnnnnnnnnnnnnnnnnnnnnnnnnnnnnnnnnnnnnnnnnnnnnnnnnnnnnnnnnnnnnnnnnnnnnnnnnnnnnnnnnnnnnnnnnnnnnnnnnnnnnnnnnnnnnnnnnnnnnnnnnnnnnnnnnnnnnnnnnnnnnnnnnnnnnnnnnnnnnnnnnnnnnnnnnnnnnnnnnnnnnnnnnnnnnnnnnnnnnnnnnnnnnnnnnnnnnnnnnnnnnnnnnnnnnnnnnnnnnnnnnnnnnnnnnnnnnnnnnnnnnnnnnnnnnnnnnnnnnnnnnnnnnnnnnnnnnnnnnnnnnnnnnnnnnnnnnnnnnnnnnnnnnnnnnnnnnnnnnnnnnnnnnnnnnnnnnnnnnnnnnnnnnnnnnnnnnnnnnnnnnnnnnnnnnnnnnnnnnnnnnnnnnnnnnnnnnnnnnnnnnnnnnnnnnnnnnnnnnnnnnnnnnnnnnnnnnnnnnnnnnnnnnnnnnnnnnnnnnnnnnnnnnnnnnnnnnnnnnnnnnnnnnnnnnnnnnnnnnnnnnnnnnnnnnnnnnnnnnnnnnnnnnnnnnnnnnnnnnnnnnnnnnnnnnnnnnnnnnnnnnnnnnnnnnnnnnnnnnnnnnnnnnnnnnnnnnnnnnnnnnnnnnnnnnnnnnnnnnnnnnnnnnnnnnnnnnnnnnnnnnnnnnnnnnnnnnnnnnnnnnnnnnnnnnnnnnnnnnnnnnnnnnnnnnnnnnnnnnnnnnnnnnnnnnnnnnnnnnnnnnnnnnnnnnnnnnnnnnnnnnnnnnnnnnnnnnnnnnnnnnnnnnnnnnnnnnnnnnnnnnnnnnnnnnnnnnnnnnnnnnnnnnnnnnnnnnnnnnnnnnnnnnnnnnnnnnnnnnnnnnnnnnnnnnnnnnnnnnnnnnnnnnnnnnnnnnnnnnnnnnnnnnnnnnnnnnnnnnnnnnnnnnnnnnnnnnnnnnnnnnnnnnnnnnnnnnnnnnnnnnnnnnnnnnnnnnnnnnnnnnnnnnnnnnnnnnnnnnnnnnnnnnnnnnnnnnnnnnnnnnnnnnnnnnnnnnnnnnnnnnnnnnnnnnnnnnnnnnnnnnnnnnnnnnnnnnnnnnnnnnnnnnnnnnnnnnnnnnnnnnnnnnnnnnnnnnnnnnnnnnnnnnnnnnnnnnnnnnnnnnnnnnnnnnnnnnnnnnnnnnnnnnnnnnnnnnnnnnnnnnnnnnnnnnnnnnnnnnnnnnnnnnnnnnnnnnnnnnnnnnnnnnnnnnnnnnnnnnnnnnnnnnnnnnnnnnnnnnnnnnnnnnnnnnnnnnnnnnnnnnnnnnnnnnnnnnnnnnnnnnnnnnnnnnnnnnnnnnnnnnnnnnnnnnnnnnnnnnnnnnnnnnnnnnnnnnnnnnnnnnnnnnnnnnnnnnnnnnnnnnnnnnnnnnnnnnnnnnnnnnnnnnnnnnnnnnnnnnnnnnnnnnnnnnnnnnnnnnnnnnnnnnnnnnnnnnnnnnnnnnnnnnnnnnnnnnnnnnnnnnnnnnnnnnnnnnnnnnnnnnnnnnnnnnnnnnnnnnnnnnnnnnnnnnnnnnnnnnnnnnnnnnnnnnnnnnnnnnnnnnnnnnnnnnnnnnnnnnnnnnnnnnnnnnnnnnnnnnnnnnnnnnnnnnnnnnnnnnnnnnnnnnnnnnnnnnnnnnnnnnnnnnnnnnnnnnnnnnnnnnnnnnnnnnnnnnnnnnnnnnnnnnnnnnnnnnnnnnnnnnnnnnnnnnnnnnnnnnnnnnnnnnnnnnnnnnnnnnnnnnnnnnnnnnnnnnnnnnnnnnnnnnnnnnnnnnnnnnnnnnnnnnnnnnnnnnnnnnnnnnnnnnnnnnnnnnnnnnnnnnnnnnnnnnnnnnnnnnnnnnnnnnnnnnnnnnnnnnnnnnnnnnnnnnnnnnnnnnnnnnnnnnnnnnnnnnnnnnnnnnnnnnnnnnnnnnnnnnnnnnnnnnnnnnnnnnnnnnnnnnnnnnnnnnnnnnnnnnnnnnnnnnnnnnnnnnnnnnnnnnnnnnnnnnnnnnnnnnnnnnnnnnnnnnnnnnnnnnnnnnnnnnnnnnnnnnnnnnnnnnnnnnnnnnnnnnnnnnnnnnnnnnnnnnnnnnnnnnnnnnnnnnnnnnnnnnnnnnnnnnnnnnnnnnnnnnnnnnnnnnnnnnnnnnnnnnnnnnnnnnnnnnnnnnnnnnnnnnnnnnnnnnnnnnnnnnnnnnnnnnnnnnnnnnnnnnnnnnnnnnnnnnnnnnnnnnnnnnnnnnnnnnnnnnnnnnnnnnnnnnnnnnnnnnnnnnnnnnnnnnnnnnnnnnnnnnnnnnnnnnnnnnnnnnnnnnnnnnnnnnnnnnnnnnnnnnnnnnnnnnnnnnnnnnnnnnnnnnnnnnnnnnnnnnnnnnnnnnnnnnnnnnnnnnnnnnnnnnnnnnnnnnnnnnnnnnnnnnnnnnnnnnnnnnnnnnnnnnnnnnnnnnnnnnnnnnnnnnnnnnnnnnnnnnnnnnnnnnnnnnnnnnnnnnnnnnnnnnnnnnnnnnnnnnnnnnnnnnnnnnnnnnnnnnnnnnnnnnnnnnnnnnnnnnnnnnnnnnnnnnnnnnnnnnnnnnnnnnnnnnnnnnnnnnnnnnnnnnnnnnnnnnnnnnnnnnnnnnnnnnnnnnnnnnnnnnnnnnnnnnnnnnnnnnnnnnnnnnnnnnnnnnnnnnnnnnnnnnnnnnnnnnnnnnnnnnnnnnnnnnnnnnnnnnnnnnnnnnnnnnnnnnnnnnnnnnnnnnnnnnnnnnnnnnnnnnnnnnnnnnnnnnnnnnnnnnnnnnnnnnnnnnnnnnnnnnnnnnnnnnnnnnnnnnnnnnnnnnnnnnnnnnnnnnnnnnnnnnnnnnnnnnnnnnnnnnnnnnnnnnnnnnnnnnnnnnnnnnnnnnnnnnnnnnnnnnnnnnnnnnnnnnnnnnnnnnnnnnnnnnnnnnnnnnnnnnnnnnnnnnnnnnnnnnnnnnnnnnnnnnnnnnnnnnnnnnnnnnnnnnnnnnnnnnnnnnnnnnnnnnnnnnnnnnnnnnnnnnnnnnnnnnnnnnnnnnnnnnnnnnnnnnnnnnnnnnnnnnnnnnnnnnnnnnnnnnnnnnnnnnnnnnnnnnnnnnnnnnnnnnnnnnnnnnnnnnnnnnnnnnnnnnnnnnnnnnnnnnnnnnnnnnnnnnnnnnnnnnnnnnnnnnnnnnnnnnnnnnnnnnnnnnnnnnnnnnnnnnnnnnnnnnnnnnnnnnnnnnnnnnnnnnnnnnnnnnnnnnnnnnnnnnnnnnnnnnnnnnnnnnnnnnnnnnnnnnnnnnnnnnnnnnnnnnnnnnnnnnnnnnnnnnnnnnnnnnnnnnnnnnnnnnnnnnnnnnnnnnnnnnnnnnnnnnnnnnnnnnnnnnnnnnnnnnnnnnnnnnnnnnnnnnnnnnnnnnnnnnnnnnnnnnnnnnnnnnnnnnnnnnnnnnnnnnnnnnnnnnnnnnnnnnnnnnnnnnnnnnnnnnnnnnnnnnnnnnnnnnnnnnnnnnnnnnnnnnnnnnnnnnnnnnnnnnnnnnnnnnnnnnnnnnnnnnnnnnnnnnnnnnnnnnnnnnnnnnnnnnnnnnnnnnnnnnnnnnnnnnnnnnnnnnnnnnnnnnnnnnnnnnnnnnnnnnnnnnnnnnnnnnnnnnnnnnnnnnnnnnnnnnnnnnnnnnnnnnnnnnnnnnnnnnnnnnnnnnnnnnnnnnnnnnnnnnnnnnnnnnnnnnnnnnnnnnnnnnnnnnnnnnnnnnnnnnnnnnnnnnnnnnnnnnnnnnnnnnnnnnnnnnnnnnnnnnnnnnnnnnnnnnnnnnnnnnnnnnnnnnnnnnnnnnnnnnnnnnnnnnnnnnnnnnnnnnnnnnnnnnnnnnnnnnnnnnnnnnnnnnnnnnnnnnnnnnnnnnnnnnnnnnnnnnnnnnnnnnnnnnnnnnnnnnnnnnnnnnnnnnnnnnnnnnnnnnnnnnnnnnnnnnnnnnnnnnnnnnnnnnnnnnnnnnnnnnnnnnnnnnnnnnnnnnnnnnnnnnnnnnnnnnnnnnnnnnnnnnnnnnnnnnnnnnnnnnnnnnnnnnnnnnnnnnnnnnnnnnnnnnnnnnnnnnnnnnnnnnnnnnnnnnnnnnnnnnnnnnnnnnnnnnnnnnnnnnnnnnnnnnnnnnnnnnnnnnnnnnnnnnnnnnnnnnnnnnnnnnnnnnnnnnnnnnnnnnnnnnnnnnnnnnnnnnnnnnnnnnnnnnnnnnnnnnnnnnnnnnnnnnnnnnnnnnnnnnnnnnnnnnnnnnnnnnnnnnnnnnnnnnnnnnnnnnnnnnnnnnnnnnnnnnnnnnnnnnnnnnnnnnnnnnnnnnnnnnnnnnnnnnnnnnnnnnnnnnnnnnnnnnnnnnnnnnnnnnnnnnnnnnnnnnnnnnnnnnnnnnnnnnnnnnnnnnnnnnnnnnnnnnnnnnnnnnnnnnnnnnnnnnnnnnnnnnnnnnnnnnnnnnnnnnnnnnnnnnnnnnnnnnnnnnnnnnnnnnnnnnnnnnnnnnnnnnnnnnnnnnnnnnnnnnnnnnnnnnnnnnnnnnnnnnnnnnnnnnnnnnnnnnnnnnnnnnnnnnnnnnnnnnnnnnnnnnnnnnnnnnnnnnnnnnnnnnnnnnnnnnnnnnnnnnnnnnnnnnnnnnnnnnnnnnnnnnnnnnnnnnnnnnnnnnnnnnnnnnnnnnnnnnnnnnnnnnnnnnnnnnnnnnnnnnnnnnnnnnnnnnnnnnnnnnnnnnnnnnnnnnnnnnnnnnnnnnnnnnnnnnnnnnnnnnnnnnnnnnnnnnnnnnnnnnnnnnnnnnnnnnnnnnnnnnnnnnnnnnnnnnnnnnnnnnnnnnnnnnnnnnnnnnnnnnnnnnnnnnnnnnnnnnnnnnnnnnnnnnnnnnnnnnnnnnnnnnnnnnnnnnnnnnnnnnnnnnnnnnnnnnnnnnnnnnnnnnnnnnnnnnnnnnnnnnnnnnnnnnnnnnnnnnnnnnnnnnnnnnnnnnnnnnnnnnnnnnnnnnnnnnnnnnnnnnnnnnnnnnnnnnnnnnnnnnnnnnnnnnnnnnnnnnnnnnnnnnnnnnnnnnnnnnnnnnnnnnnnnnnnnnnnnnnnnnnnnnnnnnnnnnnnnnnnnnnnnnnnnnnnnnnnnnnnnnnnnnnnnnnnnnnnnnnnnnnnnnnnnnnnnnnnnnnnnnnnnnnnnnnnnnnnnnnnnnnnnnnnnnnnnnnnnnnnnnnnnnnnnnnnnnnnnnnnnnnnnnnnnnnnnnnnnnnnnnnnnnnnnnnnnnnnnnnnnnnnnnnnnnnnnnnnnnnnnnnnnnnnnnnnnnnnnnnnnnnnnnnnnnnnnnnnnnnnnnnnnnnnnnnnnnnnnnnnnnnnnnnnnnnnnnnnnnnnnnnnnnnnnnnnnnnnnnnnnnnnnnnnnnnnnnnnnnnnnnnnnnnnnnnnnnnnnnnnnnnnnnnnnnnnnnnnnnnnnnnnnnnnnnnnnnnnnnnnnnnnnnnnnnnnnnnnnnnnnnnnnnnnnnnnnnnnnnnnnnnnnnnnnnnnnnnnnnnnnnnnnnnnnnnnnnnnnnnnnnnnnnnnnnnnnnnnnnnnnnnnnnnnnnnnnnnnnnnnnnnnnnnnnnnnnnnnnnnnnnnnnnnnnnnnnnnnnnnnnnnnnnnnnnnnnnnnnnnnnnnnnnnnnnnnnnnnnnnnnnnnnnnnnnnnnnnnnnnnnnnnnnnnnnnnnnnnnnnnnnnnnnnnnnnnnnnnnnnnnnnnnnnnnnnnnnnnnnnnnnnnnnnnnnnnnnnnnnnnnnnnnnnnnnnnnnnnnnnnnnnnnnnnnnnnnnnnnnnnnnnnnnnnnnnnnnnnnnnnnnnnnnnnnnnnnnnnnnnnnnnnnnnnnnnnnnnnnnnnnnnnnnnnnnnnnnnnnnnnnnnnnnnnnnnnnnnnnnnnnnnnnnnnnnnnnnnnnnnnnnnnnnnnnnnnnnnnnnnnnnnnnnnnnnnnnnnnnnnnnnnnnnnnnnnnnnnnnnnnnnnnnnnnnnnnnnnnnnnnnnnnnnnnnnnnnnnnnnnnnnnnnnnnnnnnnnnnnnnnnnnnnnnnnnnnnnnnnnnnnnnnnnnnnnnnnnnnnnnnnnnnnnnnnnnnnnnnnnnnnnnnnnnnnnnnnnnnnnnnnnnnnnnnnnnnnnnnnnnnnnnnnnnnnnnnnnnnnnnnnnnnnnnnnnnnnnnnnnnnnnnnnnnnnnnnnnnnnnnnnnnnnnnnnnnnnnnnnnnnnnnnnnnnnnnnnnnnnnnnnnnnnnnnnnnnnnnnnnnnnnnnnnnnnnnnnnnnnnnnnnnnnnnnnnnnnnnnnnnnnnnnnnnnnnnnnnnnnnnnnnnnnnnnnnnnnnnnnnnnnnnnnnnnnnnnnnnnnnnnnnnnnnnnnnnnnnnnnnnnnnnnnnnnnnnnnnnnnnnnnnnnnnnnnnnnnnnnnnnnnnnnnnnnnnnnnnnnnnnnnnnnnnnnnnnnnnnnnnnnnnnnnnnnnnnnnnnnnnnnnnnnnnnnnnnnnnnnnnnnnnnnnnnnnnnnnnnnnnnnnnnnnnnnnnnnnnnnnnnnnnnnnnnnnnnnnnnnnnnnnnnnnnnnnnnnnnnnnnnnnnnnnnnnnnnnnnnnnnnnnnnnnnnnnnnnnnnnnnnnnnnnnnnnnnnnnnnnnnnnnnnnnnnnnnnnnnnnnnnnnnnnnnnnnnnnnnnnnnnnnnnnnnnnnnnnnnnnnnnnnnnnnnnnnnnnnnnnnnnnnnnnnnnnnnnnnnnnnnnnnnnnnnnnnnnnnnnnnnnnnnnnnnnnnnnnnnnnnnnnnnnnnnnnnnnnnnnnnnnnnnnnnnnnnnnnnnnnnnnnnnnnnnnnnnnnnnnnnnnnnnnnnnnnnnnnnnnnnnnnnnnnnnnnnnnnnnnnnnnnnnnnnnnnnnnnnnnnnnnnnnnnnnnnnnnnnnnnnnnnnnnnnnnnnnnnnnnnnnnnnnnnnnnnnnnnnnnnnnnnnnnnnnnnnnnnnnnnnnnnnnnnnnnnnnnnnnnnnnnnnnnnnnnnnnnnnnnnnnnnnnnnnnnnnnnnnnnnnnnnnnnnnnnnnnnnnnnnnnnnnnnnnnnnnnnnnnnnnnnnnnnnnnnnnnnnnnnnnnnnnnnnnnnnnnnnnnnnnnnnnnnnnnnnnnnnnnnnnnnnnnnnnnnnnnnnnnnnnnnnnnnnnnnnnnnnnnnnnnnnnnnnnnnnnnnnnnnnnnnnnnnnnnnnnnnnnnnnnnnnnnnnnnnnnnnnnnnnnnnnnnnnnnnnnnnnnnnnnnnnnnnnnnnnnnnnnnnnnnnnnnnnnnnnnnnnnnnnnnnnnnnnnnnnnnnnnnnnnnnnnnnnnnnnnnnnnnnnnnnnnnnnnnnnnnnnnnnnnnnnnnnnnnnnnnnnnnnnnnnnnnnnnnnnnnnnnnnnnnnnnnnnnnnnnnnnnnnnnnnnnnnnnnnnnnnnnnnnnnnnnnnnnnnnnnnnnnnnnnnnnnnnnnnnnnnnnnnnnnnnnnnnnnnnnnnnnnnnnnnnnnnnnnnnnnnnnnnnnnnnnnnnnnnnnnnnnnnnnnnnnnnnnnnnnnnnnnnnnnnnnnnnnnnnnnnnnnnnnnnnnnnnnnnnnnnnnnnnnnnnnnnnnnnnnnnnnnnnnnnnnnnnnnnnnnnnnnnnnnnnnnnnnnnnnnnnnnnnnnnnnnnnnnnnnnnnnnnnnnnnnnnnnnnnnnnnnnnnnnnnnnnnnnnnnnnnnnnnnnnnnnnnnnnnnnnnnnnnnnnnnnnnnnnnnnnnnnnnnnnnnnnnnnnnnnnnnnnnnnnnnnnnnnnnnnnnnnnnnnnnnnnnnnnnnnnnnnnnnnnnnnnnnnnnnnnnnnnnnnnnnnnnnnnnnnnnnnnnnnnnnnnnnnnnnnnnnnnnnnnnnnnnnnnnnnnnnnnnnnnnnnnnnnnnnnnnnnnnnnnnnnnnnnnnnnnnnnnnnnnnnnnnnnnnnnnnnnnnnnnnnnnnnnnnnnnnnnnnnnnnnnnnnnnnnnnnnnnnnnnnnnnnnnnnnnnnnnnnnnnnnnnnnnnnnnnnnnnnnnnnnnnnnnnnnnnnnnnnnnnnnnnnnnnnnnnnnnnnnnnnnnnnnnnnnnnnnnnnnnnnnnnnnnnnnnnnnnnnnnnnnnnnnnnnnnnnnnnnnnnnnnnnnnnnnnnnnnnnnnnnnnnnnnnnnnnnnnnnnnnnnnnnnnnnnnnnnnnnnnnnnnnnnnnnnnnnnnnnnnnnnnnnnnnnnnnnnnnnnnnnnnnnnnnnnnnnnnnnnnnnnnnnnnnnnnnnnnnnnnnnnnnnnnnnnnnnnnnnnnnnnnnnnnnnnnnnnnnnnnnnnnnnnnnnnnnnnnnnnnnnnnnnnnnnnnnnnnnnnnnnnnnnnnnnnnnnnnnnnnnnnnnnnnnnnnnnnnnnnnnnnnnnnnnnnnnnnnnnnnnnnnnnnnnnnnnnnnnnnnnnnnnnnnnnnnnnnnnnnnnnnnnnnnnnnnnnnnnnnnnnnnnnnnnnnnnnnnnnnnnnnnnnnnnnnnnnnnnnnnnnnnnnnnnnnnnnnnnnnnnnnnnnnnnnnnnnnnnnnnnnnnnnnnnnnnnnnnnnnnnnnnnnnnnnnnnnnnnnnnnnnnnnnnnnnnnnnnnnnnnnnnnnnnnnnnnnnnnnnnnnnnnnnnnnnnnnnnnnnnnnnnnnnnnnnnnnnnnnnnnnnnnnnnnnnnnnnnnnnnnnnnnnnnnnnnnnnnnnnnnnnnnnnnnnnnnnnnnnnnnnnnnnnnnnnnnnnnnnnnnnnnnnnnnnnnnnnnnnnnnnnnnnnnnnnnnnnnnnnnnnnnnnnnnnnnnnnnnnnnnnnnnnnnnnnnnnnnnnnnnnnnnnnnnnnnnnnnnnnnnnnnnnnnnnnnnnnnnnnnnnnnnnnnnnnnnnnnnnnnnnnnnnnnnnnnnnnnnnnnnnnnnnnnnnnnnnnnnnnnnnnnnnnnnnnnnnnnnnnnnnnnnnnnnnnnnnnnnnnnnnnnnnnnnnnnnnnnnnnnnnnnnnnnnnnnnnnnnnnnnnnnnnnnnnnnnnnnnnnnnnnnnnnnnnnnnnnnnnnnnnnnnnnnnnnnnnnnnnnnnnnnnnnnnnnnnnnnnnnnnnnnnnnnnnnnnnnnnnnnnnnnnnnnnnnnnnnnnnnnnnnnnnnnnnnnnnnnnnnnnnnnnnnnnnnnnnnnnnnnnnnnnnnnnnnnnnnnnnnnnnnnnnnnnnnnnnnnnnnnnnnnnnnnnnnnnnnnnnnnnnnnnnnnnnnnnnnnnnnnnnnnnnnnnnnnnnnnnnnnnnnnnnnnnnnnnnnnnnnnnnnnnnnnnnnnnnnnnnnnnnnnnnnnnnnnnnnnnnnnnnnnnnnnnnnnnnnnnnnnnnnnnnnnnnnnnnnnnnnnnnnnnnnnnnnnnnnnnnnnnnnnnnnnnnnnnnnnnnnnnnnnnnnnnnnnnnnnnnnnnnnnnnnnnnnnnnnnnnnnnnnnnnnnnnnnnnnnnnnnnnnnnnnnnnnnnnnnnnnnnnnnnnnnnnnnnnnnnnnnnnnnnnnnnnnnnnnnnnnnnnnnnnnnnnnnnnnnnnnnnnnnnnnnnnnnnnnnnnnnnnnnnnnnnnnnnnnnnnnnnnnnnnnnnnnnnnnnnnnnnnnnnnnnnnnnnnnnnnnnnnnnnnnnnnnnnnnnnnnnnnnnnnnnnnnnnnnnnnnnnnnnnnnnnnnnnnnnnnnnnnnnnnnnnnnnnnnnnnnnnnnnnnnnnnnnnnnnnnnnnnnnnnnnnnnnnnnnnnnnnnnnnnnnnnnnnnnnnnnnnnnnnnnnnnnnnnnnnnnnnnnnnnnnnnnnnnnnnnnnnnnnnnnnnnnnnnnnnnnnnnnnnnnnnnnnnnnnnnnnnnnnnnnnnnnnnnnnnnnnnnnnnnnnnnnnnnnnnnnnnnnnnnnnnnnnnnnnnnnnnnnnnnnnnnnnnnnnnnnnnnnnnnnnnnnnnnnnnnnnnnnnnnnnnnnnnnnnnnnnnnnnnnnnnnnnnnnnnnnnnnnnnnnnnnnnnnnnnnnnnnnnnnnnnnnnnnnnnnnnnnnnnnnnnnnnnnnnnnnnnnnnnnnnnnnnnnnnnnnnnnnnnnnnnnnnnnnnnnnnnnnnnnnnnnnnnnnnnnnnnnnnnnnnnnnnnnnnnnnnnnnnnnnnnnnnnnnnnnnnnnnnnnnnnnnnnnnnnnnnnnnnnnnnnnnnnnnnnnnnnnnnnnnnnnnnnnnnnnnnnnnnnnnnnnnnnnnnnnnnnnnnnnnnnnnnnnnnnnnnnnnnnnnnnnnnnnnnnnnnnnnnnnnnnnnnnnnnnnnnnnnnnnnnnnnnnnnnnnnnnnnnnnnnnnnnnnnnnnnnnnnnnnnnnnnnnnnnnnnnnnnnnnnnnnnnnnnnnnnnnnnnnnnnnnnnnnnnnnnnnnnnnnnnnnnnnnnnnnnnnnnnnnnnnnnnnnnnnnnnnnnnnnnnnnnnnnnnnnnnnnnnnnnnnnnnnnnnnnnnnnnnnnnnnnnnnnnnnnnnnnnnnnnnnnnnnnnnnnnnnnnnnnnnnnnnnnnnnnnnnnnnnnnnnnnnnnnnnnnnnnnnnnnnnnnnnnnnnnnnnnnnnnnnnnnnnnnnnnnnnnnnnnnnnnnnnnnnnnnnnnnnnnnnnnnnnnnnnnnnnnnnnnnnnnnnnnnnnnnnnnnnnnnnnnnnnnnnnnnnnnnnnnnnnnnnnnnnnnnnnnnnnnnnnnnnnnnnnnnnnnnnnnnnnnnnnnnnnnnnnnnnnnnnnnnnnnnnnnnnnnnnnnnnnnnnnnnnnnnnnnnnnnnnnnnnnnnnnnnnnnnnnnnnnnnnnnnnnnnnnnnnnnnnnnnnnnnnnnnnnnnnnnnnnnnnnnnnnnnnnnnnnnnnnnnnnnnnnnnnnnnnnnnnnnnnnnnnnnnnnnnnnnnnnnnnnnnnnnnnnnnnnnnnnnnnnnnnnnnnnnnnnnnnnnnnnnnnnnnnnnnnnnnnnnnnnnnnnnnnnnnnnnnnnnnnnnnnnnnnnnnnnnnnnnnnnnnnnnnnnnnnnnnnnnnnnnnnnnnnnnnnnnnnnnnnnnnnnnnnnnnnnnnnnnnnnnnnnnnnnnnnnnnnnnnnnnnnnnnnnnnnnnnnnnnnnnnnnnnnnnnnnnnnnnnnnnnnnnnnnnnnnnnnnnnnnnnnnnnnnnnnnnnnnnnnnnnnnnnnnnnnnnnnnnnnnnnnnnnnnnnnnnnnnnnnnnnnnnnnnnnnnnnnnnnnnnnnnnnnnnnnnnnnnnnnnnnnnnnnnnnnnnnnnnnnnnnnnnnnnnnnnnnnnnnnnnnnnnnnnnnnnnnnnnnnnnnnnnnnnnnnnnnnnnnnnnnnnnnnnnnnnnnnnnnnnnnnnnnnnnnnnnnnnnnnnnnnnnnnnnnnnnnnnnnnnnnnnnnnnnnnnnnnnnnnnnnnnnnnnnnnnnnnnnnnnnnnnnnnnnnnnnnnnnnnnnnnnnnnnnnnnnnnnnnnnnnnnnnnnnnnnnnnnnnnnnnnnnnnnnnnnnnnnnnnnnnnnnnnnnnnnnnnnnnnnnnnnnnnnnnnnnnnnnnnnnnnnnnnnnnnnnnnnnnnnnnnnnnnnnnnnnnnnnnnnnnnnnnnnnnnnnnnnnnnnnnnnnnnnnnnnnnnnnnnnnnnnnnnnnnnnnnnnnnnnnnnnnnnnnnnnnnnnnnnnnnnnnnnnnnnnnnnnnnnnnnnnnnnnnnnnnnnnnnnnnnnnnnnnnnnnnnnnnnnnnnnnnnnnnnnnnnnnnnnnnnnnnnnnnnnnnnnnnnnnnnnnnnnnnnnnnnnnnnnnnnnnnnnnnnnnnnnnnnnnnnnnnnnnnnnnnnnnnnnnnnnnnnnnnnnnnnnnnnnnnnnnnnnnnnnnnnnnnnnnnnnnnnnnnnnnnnnnnnnnnnnnnnnnnnnnnnnnnnnnnnnnnnnnnnnnnnnnnnnnnnnnnnnnnnnnnnnnnnnnnnnnnnnnnnnnnnnnnnnnnnnnnnnnnnnnnnnnnnnnnnnnnnnnnnnnnnnnnnnnnnnnnnnnnnnnnnnnnnnnnnnnnnnnnnnnnnnnnnnnnnnnnnnnnnnnnnnnnnnnnnnnnnnnnnnnnnnnnnnnnnnnnnnnnnnnnnnnnnnnnnnnnnnnnnnnnnnnnnnnnnnnnnnnnnnnnnnnnnnnnnnnnnnnnnnnnnnnnnnnnnnnnnnnnnnnnnnnnnnnnnnnnnnnnnnnnnnnnnnnnnnnnnnnnnnnnnnnnnnnnnnnnnnnnnnnnnnnnnnnnnnnnnnnnnnnnnnnnnnnnnnnnnnnnnnnnnnnnnnnnnnnnnnnnnnnnnnnnnnnnnnnnnnnnnnnnnnnnnnnnnnnnnnnnnnnnnnnnnnnnnnnnnnnnnnnnnnnnnnnnnnnnnnnnnnnnnnnnnnnnnnnnnnnnnnnnnnnnnnnnnnnnnnnnnnnnnnnnnnnnnnnnnnnnnnnnnnnnnnnnnnnnnnnnnnnnnnnnnnnnnnnnnnnnnnnnnnnnnnnnnnnnnnnnnnnnnnnnnnnnnnnnnnnnnnnnnnnnnnnnnnnnnnnnnnnnnnnnnnnnnnnnnnnnnnnnnnnnnnnnnnnnnnnnnnnnnnnnnnnnnnnnnnnnnnnnnnnnnnnnnnnnnnnnnnnnnnnnnnnnnnnnnnnnnnnnnnnnnnnnnnnnnnnnnnnnnnnnnnnnnnnnnnnnnnnnnnnnnnnnnnnnnnnnnnnnnnnnnnnnnnnnnnnnnnnnnnnnnnnnnnnnnnnnnnnnnnnnnnnnnnnnnnnnnnnnnnnnnnnnnnnnnnnnnnnnnnnnnnnnnnnnnnnnnnnnnnnnnnnnnnnnnnnnnnnnnnnnnnnnnnnnnnnnnnnnnnnnnnnnnnnnnnnnnnnnnnnnnnnnnnnnnnnnnnnnnnnnnnnnnnnnnnnnnnnnnnnnnnnnnnnnnnnnnnnnnnnnnnnnnnnnnnnnnnnnnnnnnnnnnnnnnnnnnnnnnnnnnnnnnnnnnnnnnnnnnnnnnnnnnnnnnnnnnnnnnnnnnnnnnnnnnnnnnnnnnnnnnnnnnnnnnnnnnnnnnnnnnnnnnnnnnnnnnnnnnnnnnnnnnnnnnnnnnnnnnnnnnnnnnnnnnnnnnnnnnnnnnnnnnnnnnnnnnnnnnnnnnnnnnnnnnnnnnnnnnnnnnnnnnnnnnnnnnnnnnnnnnnnnnnnnnnnnnnnnnnnnnnnnnnnnnnnnnnnnnnnnnnnnnnnnnnnnnnnnnnnnnnnnnnnnnnnnnnnnnnnnnnnnnnnnnnnnnnnnnnnnnnnnnnnnnnnnnnnnnnnnnnnnnnnnnnnnnnnnnnnnnnnnnnnnnnnnnnnnnnnnnnnnnnnnnnnnnnnnnnnnnnnnnnnnnnnnnnnnnnnnnnnnnnnnnnnnnnnnnnnnnnnnnnnnnnnnnnnnnnnnnnnnnnnnnnnnnnnnnnnnnnnnnnnnnnnnnnnnnnnnnnnnnnnnnnnnnnnnnnnnnnnnnnnnnnnnnnnnnnnnnnnnnnnnnnnnnnnnnnnnnnnnnnnnnnnnnnnnnnnnnnnnnnnnnnnnnnnnnnnnnnnnnnnnnnnnnnnnnnnnnnnnnnnnnnnnnnnnnnnnnnnnnnnnnnnnnnnnnnnnnnnnnnnnnnnnnnnnnnnnnnnnnnnnnnnnnnnnnnnnnnnnnnnnnnnnnnnnnnnnnnnnnnnnnnnnnnnnnnnnnnnnnnnnnnnnnnnnnnnnnnnnnnnnnnnnnnnnnnnnnnnnnnnnnnnnnnnnnnnnnnnnnnnnnnnnnnnnnnnnnnnnnnnnnnnnnnnnnnnnnnnnnnnnnnnnnnnnnnnnnnnnnnnnnnnnnnnnnnnnnnnnnnnnnnnnnnnnnnnnnnnnnnnnnnnnnnnnnnnnnnnnnnnnnnnnnnnnnnnnnnnnnnnnnnnnnnnnnnnnnnnnnnnnnnnnnnnnnnnnnnnnnnnnnnnnnnnnnnnnnnnnnnnnnnnnnnnnnnnnnnnnnnnnnnnnnnnnnnnnnnnnnnnnnnnnnnnnnnnnnnnnnnnnnnnnnnnnnnnnnnnnnnnnnnnnnnnnnnnnnnnnnnnnnnnnnnnnnnnnnnnnnnnnnnnnnnnnnnnnnnnnnnnnnnnnnnnnnnnnnnnnnnnnnnnnnnnnnnnnnnnnnnnnnnnnnnnnnnnnnnnnnnnnnnnnnnnnnnnnnnnnnnnnnnnnnnnnnnnnnnnnnnnnnnnnnnnnnnnnnnnnnnnnnnnnnnnnnnnnnnnnnnnnnnnnnnnnnnnnnnnnnnnnnnnnnnnnnnnnnnnnnnnnnnnnnnnnnnnnnnnnnnnnnnnnnnnnnnnnnnnnnnnnnnnnnnnnnnnnnnnnnnnnnnnnnnnnnnnnnnnnnnnnnnnnnnnnnnnnnnnnnnnnnnnnnnnnnnnnnnnnnnnnnnnnnnnnnnnnnnnnnnnnnnnnnnnnnnnnnnnnnnnnnnnnnnnnnnnnnnnnnnnnnnnnnnnnnnnnnnnnnnnnnnnnnnnnnnnnnnnnnnnnnnnnnnnnnnnnnnnnnnnnnnnnnnnnnnnnnnnnnnnnnnnnnnnnnnnnnnnnnnnnnnnnnnnnnnnnnnnnnnnnnnnnnnnnnnnnnnnnnnnnnnnnnnnnnnnnnnnnnnnnnnnnnnnnnnnnnnnnnnnnnnnnnnnnnnnnnnnnnnnnnnnnnnnnnnnnnnnnnnnnnnnnnnnnnnnnnnnnnnnnnnnnnnnnnnnnnnnnnnnnnnnnnnnnnnnnnnnnnnnnnnnnnnnnnnnnnnnnnnnnnnnnnnnnnnnnnnnnnnnnnnnnnnnnnnnnnnnnnnnnnnnnnnnnnnnnnnnnnnnnnnnnnnnnnnnnnnnnnnnnnnnnnnnnnnnnnnnnnnnnnnnnnnnnnnnnnnnnnnnnnnnnnnnnnnnnnnnnnnnnnnnnnnnnnnnnnnnnnnnnnnnnnnnnnnnnnnnnnnnnnnnnnnnnnnnnnnnnnnnnnnnnnnnnnnnnnnnnnnnnnnnnnnnnnnnnnnnnnnnnnnnnnnnnnnnnnnnnnnnnnnnnnnnnnnnnnnnnnnnnnnnnnnnnnnnnnnnnnnnnnnnnnnnnnnnnnnnnnnnnnnnnnnnnnnnnnnnnnnnnnnnnnnnnnnnnnnnnnnnnnnnnnnnnnnnnnnnnnnnnnnnnnnnnnnnnnnnnnnnnnnnnnnnnnnnnnnnnnnnnnnnnnnnnnnnnnnnnnnnnnnnnnnnnnnnnnnnnnnnnnnnnnnnnnnnnnnnnnnnnnnnnnnnnnnnnnnnnnnnnnnnnnnnnnnnnnnnnnnnnnnnnnnnnnnnnnnnnnnnnnnnnnnnnnnnnnnnnnnnnnnnnnnnnnnnnnnnnnnnnnnnnnnnnnnnnnnnnnnnnnnnnnnnnnnnnnnnnnnnnnnnnnnnnnnnnnnnnnnnnnnnnnnnnnnnnnnnnnnnnnnnnnnnnnnnnnnnnnnnnnnnnnnnnnnnnnnnnnnnnnnnnnnnnnnnnnnnnnnnnnnnnnnnnnnnnnnnnnnnnnnnnnnnnnnnnnnnnnnnnnnnnnnnnnnnnnnnnnnnnnnnnnnnnnnnnnnnnnnnnnnnnnnnnnnnnnnnnnnnnnnnnnnnnnnnnnnnnnnnnnnnnnnnnnnnnnnnnnnnnnnnnnnnnnnnnnnnnnnnnnnnnnnnnnnnnnnnnnnnnnnnnnnnnnnnnnnnnnnnnnnnnnnnnnnnnnnnnnnnnnnnnnnnnnnnnnnnnnnnnnnnnnnnnnnnnnnnnnnnnnnnnnnnnnnnnnnnnnnnnnnnnnnnnnnnnnnnnnnnnnnnnnnnnnnnnnnnnnnnnnnnnnnnnnnnnnnnnnnnnnnnnnnnnnnnnnnnnnnnnnnnnnnnnnnnnnnnnnnnnnnnnnnnnnnnnnnnnnnnnnnnnnnnnnnnnnnnnnnnnnnnnnnnnnnnnnnnnnnnnnnnnnnnnnnnnnnnnnnnnnnnnnnnnnnnnnnnnnnnnnnnnnnnnnnnnnnnnnnnnnnnnnnnnnnnnnnnnnnnnnnnnnnnnnnnnnnnnnnnnnnnnnnnnnnnnnnnnnnnnnnnnnnnnnnnnnnnnnnnnnnnnnnnnnnnnnnnnnnnnnnnnnnnnnnnnnnnnnnnnnnnnnnnnnnnnnnnnnnnnnnnnnnnnnnnnnnnnnnnnnnnnnnnnnnnnnnnnnnnnnnnnnnnnnnnnnnnnnnnnnnnnnnnnnnnnnnnnnnnnnnnnnnnnnnnnnnnnnnnnnnnnnnnnnnnnnnnnnnnnnnnnnnnnnnnnnnnnnnnnnnnnnnnnnnnnnnnnnnnnnnnnnnnnnnnnnnnnnnnnnnnnnnnnnnnnnnnnnnnnnnnnnnnnnnnnnnnnnnnnnnnnnnnnnnnnnnnnnnnnnnnnnnnnnnnnnnnnnnnnnnnnnnnnnnnnnnnnnnnnnnnnnnnnnnnnnnnnnnnnnnnnnnnnnnnnnnnnnnnnnnnnnnnnnnnnnnnnnnnnnnnnnnnnnnnnnnnnnnnnnnnnnnnnnnnnnnnnnnnnnnnnnnnnnnnnnnnnnnnnnnnnnnnnnnnnnnnnnnnnnnnnnnnnnnnnnnnnnnnnnnnnnnnnnnnnnnnnnnnnnnnnnnnnnnnnnnnnnnnnnnnnnnnnnnnnnnnnnnnnnnnnnnnnnnnnnnnnnnnnnnnnnnnnnnnnnnnnnnnnnnnnnnnnnnnnnnnnnnnnnnnnnnnnnnnnnnnnnnnnnnnnnnnnnnnnnnnnnnnnnnnnnnnnnnnnnnnnnnnnnnnnnnnnnnnnnnnnnnnnnnnnnnnnnnnnnnnnnnnnnnnnnnnnnnnnnnnnnnnnnnnnnnnnnnnnnnnnnnnnnnnnnnnnnnnnnnnnnnnnnnnnnnnnnnnnnnnnnnnnnnnnnnnnnnnnnnnnnnnnnnnnnnnnnnnnnnnnnnnnnnnnnnnnnnnnnnnnnnnnnnnnnnnnnnnnnnnnnnnnnnnnnnnnnnnnnnnnnnnnnnnnnnnnnnnnnnnnnnnnnnnnnnnnnnnnnnnnnnnnnnnnnnnnnnnnnnnnnnnnnnnnnnnnnnnnnnnnnnnnnnnnnnnnnnnnnnnnnnnnnnnnnnnnnnnnnnnnnnnnnnnnnnnnnnnnnnnnnnnnnnnnnnnnnnnnnnnnnnnnnnnnnnnnnnnnnnnnnnnnnnnnnnnnnnnnnnnnnnnnnnnnnnnnnnnnnnnnnnnnnnnnnnnnnnnnnnnnnnnnnnnnnnnnnnnnnnnnnnnnnnnnnnnnnnnnnnnnnnnnnnnnnnnnnnnnnnnnnnnnnnnnnnnnnnnnnnnnnnnnnnnnnnnnnnnnnnnnnnnnnnnnnnnnnnnnnnnnnnnnnnnnnnnnnnnnnnnnnnnnnnnnnnnnnnnnnnnnnnnnnnnnnnnnnnnnnnnnnnnnnnnnnnnnnnnnnnnnnnnnnnnnnnnnnnnnnnnnnnnnnnnnnnnnnnnnnnnnnnnnnnnnnnnnnnnnnnnnnnnnnnnnnnnnnnnnnnnnnnnnnnnnnnnnnnnnnnnnnnnnnnnnnnnnnnnnnnnnnnnnnnnnnnnnnnnnnnnnnnnnnnnnnnnnnnnnnnnnnnnnnnnnnnnnnnnnnnnnnnnnnnnnnnnnnnnnnnnnnnnnnnnnnnnnnnnnnnnnnnnnnnnnnnnnnnnnnnnnnnnnnnnnnnnnnnnnnnnnnnnnnnnnnnnnnnnnnnnnnnnnnnnnnnnnnnnnnnnnnnnnnnnnnnnnnnnnnnnnnnnnnnnnnnnnnnnnnnnnnnnnnnnnnnnnnnnnnnnnnnnnnnnnnnnnnnnnnnnnnnnnnnnnnnnnnnnnnnnnnnnnnnnnnnnnnnnnnnnnnnnnnnnnnnnnnnnnnnnnnnnnnnnnnnnnnnnnnnnnnnnnnnnnnnnnnnnnnnnnnnnnnnnnnnnnnnnnnnnnnnnnnnnnnnnnnnnnnnnnnnnnnnnnnnnnnnnnnnnnnnnnnnnnnnnnnnnnnnnnnnnnnnnnnnnnnnnnnnnnnnnnnnnnnnnnnnnnnnnnnnnnnnnnnnnnnnnnnnnnnnnnnnnnnnnnnnnnnnnnnnnnnnnnnnnnnnnnnnnnnnnnnnnnnnnnnnnnnnnnnnnnnnnnnnnnnnnnnnnnnnnnnnnnnnnnnnnnnnnnnnnnnnnnnnnnnnnnnnnnnnnnnnnnnnnnnnnnnnnnnnnnnnnnnnnnnnnnnnnnnnnnnnnnnnnnnnnnnnnnnnnnnnnnnnnnnnnnnnnnnnnnnnnnnnnnnnnnnnnnnnnnnnnnnnnnnnnnnnnnnnnnnnnnnnnnnnnnnnnnnnnnnnnnnnnnnnnnnnnnnnnnnnnnnnnnnnnnnnnnnnnnnnnnnnnnnnnnnnnnnnnnnnnnnnnnnnnnnnnnnnnnnnnnnnnnnnnnnnnnnnnnnnnnnnnnnnnnnnnnnnnnnnnnnnnnnnnnnnnnnnnnnnnnnnnnnnnnnnnnnnnnnnnnnnnnnnnnnnnnnnnnnnnnnnnnnnnnnnnnnnnnnnnnnnnnnnnnnnnnnnnnnnnnnnnnnnnnnnnnnnnnnnnnnnnnnnnnnnnnnnnnnnnnnnnnnnnnnnnnnnnnnnnnnnnnnnnnnnnnnnnnnnnnnnnnnnnnnnnnnnnnnnnnnnnnnnnnnnnnnnnnnnnnnnnnnnnnnnnnnnnnnnnnnnnnnnnnnnnnnnnnnnnnnnnnnnnnnnnnnnnnnnnnnnnnnnnnnnnnnnnnnnnnnnnnnnnnnnnnnnnnnnnnnnnnnnnnnnnnnnnnnnnnnnnnnnnnnnnnnnnnnnnnnnnnnnnnnnnnnnnnnnnnnnnnnnnnnnnnnnnnnnnnnnnnnnnnnnnnnnnnnnnnnnnnnnnnnnnnnnnnnnnnnnnnnnnnnnnnnnnnnnnnnnnnnnnnnnnnnnnnnnnnnnnnnnnnnnnnnnnnnnnnnnnnnnnnnnnnnnnnnnnnnnnnnnnnnnnnnnnnnnnnnnnnnnnnnnnnnnnnnnnnnnnnnnnnnnnnnnnnnnnnnnnnnnnnnnnnnnnnnnnnnnnnnnnnnnnnnnnnnnnnnnnnnnnnnnnnnnnnnnnnnnnnnnnnnnnnnnnnnnnnnnnnnnnnnnnnnnnnnnnnnnnnnnnnnnnnnnnnnnnnnnnnnnnnnnnnnnnnnnnnnnnnnnnnnnnnnnnnnnnnnnnnnnnnnnnnnnnnnnnnnnnnnnnnnnnnnnnnnnnnnnnnnnnnnnnnnnnnnnnnnnnnnnnnnnnnnnnnnnnnnnnnnnnnnnnnnnnnnnnnnnnnnnnnnnnnnnnnnnnnnnnnnnnnnnnnnnnnnnnnnnnnnnnnnnnnnnnnnnnnnnnnnnnnnnnnnnnnnnnnnnnnnnnnnnnnnnnnnnnnnnnnnnnnnnnnnnnnnnnnnnnnnnnnnnnnnnnnnnnnnnnnnnnnnnnnnnnnnnnnnnnnnnnnnnnnnnnnnnnnnnnnnnnnnnnnnnnnnnnnnnnnnnnnnnnnnnnnnnnnnnnnnnnnnnnnnnnnnnnnnnnnnnnnnnnnnnnnnnnnnnnnnnnnnnnnnnnnnnnnnnnnnnnnnnnnnnnnnnnnnnnnnnnnnnnnnnnnnnnnnnnnnnnnnnnnnnnnnnnnnnnnnnnnnnnnnnnnnnnnnnnnnnnnnnnnnnnnnnnnnnnnnnnnnnnnnnnnnnnnnnnnnnnnnnnnnnnnnnnnnnnnnnnnnnnnnnnnnnnnnnnnnnnnnnnnnnnnnnnnnnnnnnnnnnnnnnnnnnnnnnnnnnnnnnnnnnnnnnnnnnnnnnnnnnnnnnnnnnnnnnnnnnnnnnnnnnnnnnnnnnnnnnnnnnnnnnnnnnnnnnnnnnnnnnnnnnnnnnnnnnnnnnnnnnnnnnnnnnnnnnnnnnnnnnnnnnnnnnnnnnnnnnnnnnnnnnnnnnnnnnnnnnnnnnnnnnnnnnnnnnnnnnnnnnnnnnnnnnnnnnnnnnnnnnnnnnnnnnnnnnnnnnnnnnnnnnnnnnnnnnnnnnnnnnnnnnnnnnnnnnnnnnnnnnnnnnnnnnnnnnnnnnnnnnnnnnnnnnnnnnnnnnnnnnnnnnnnnnnnnnnnnnnnnnnnnnnnnnnnnnnnnnnnnnnnnnnnnnnnnnnnnnnnnnnnnnnnnnnnnnnnnnnnnnnnnnnnnnnnnnnnnnnnnnnnnnnnnnnnnnnnnnnnnnnnnnnnnnnnnnnnnnnnnnnnnnnnnnnnnnnnnnnnnnnnnnnnnnnnnnnnnnnnnnnnnnnnnnnnnnnnnnnnnnnnnnnnnnnnnnnnnnnnnnnnnnnnnnnnnnnnnnnnnnnnnnnnnnnnnnnnnnnnnnnnnnnnnnnnnnnnnnnnnnnnnnnnnnnnnnnnnnnnnnnnnnnnnnnnnnnnnnnnnnnnnnnnnnnnnnnnnnnnnnnnnnnnnnnnnnnnnnnnnnnnnnnnnnnnnnnnnnnnnnnnnnnnnnnnnnnnnnnnnnnnnnnnnnnnnnnnnnnnnnnnnnnnnnnnnnnnnnnnnnnnnnnnnnnnnnnnnnnnnnnnnnnnnnnnnnnnnnnnnnnnnnnnnnnnnnnnnnnnnnnnnnnnnnnnnnnnnnnnnnnnnnnnnnnnnnnnnnnnnnnnnnnnnnnnnnnnnnnnnnnnnnnnnnnnnnnnnnnnnnnnnnnnnnnnnnnnnnnnnnnnnnnnnnnnnnnnnnnnnnnnnnnnnnnnnnnnnnnnnnnnnnnnnnnnnnnnnnnnnnnnnnnnnnnnnnnnnnnnnnnnnnnnnnnnnnnnnnnnnnnnnnnnnnnnnnnnnnnnnnnnnnnnnnnnnnnnnnnnnnnnnnnnnnnnnnnnnnnnnnnnnnnnnnnnnnnnnnnnnnnnnnnnnnnnnnnnnnnnnnnnnnnnnnnnnnnnnnnnnnnnnnnnnnnnnnnnnnnnnnnnnnnnnnnnnnnnnnnnnnnnnnnnnnnnnnnnnnnnnnnnnnnnnnnnnnnnnnnnnnnnnnnnnnnnnnnnnnnnnnnnnnnnnnnnnnnnnnnnnnnnnnnnnnnnnnnnnnnnnnnnnnnnnnnnnnnnnnnnnnnnnnnnnnnnnnnnnnnnnnnnnnnnnnnnnnnnnnnnnnnnnnnnnnnnnnnnnnnnnnnnnnnnnnnnnnnnnnnnnnnnnnnnnnnnnnnnnnnnnnnnnnnnnnnnnnnnnnnnnnnnnnnnnnnnnnnnnnnnnnnnnnnnnnnnnnnnnnnnnnnnnnnnnnnnnnnnnnnnnnnnnnnnnnnnnnnnnnnnnnnnnnnnnnnnnnnnnnnnnnnnnnnnnnnnnnnnnnnnnnnnnnnnnnnnnnnnnnnnnnnnnnnnnnnnnnnnnnnnnnnnnnnnnnnnnnnnnnnnnnnnnnnnnnnnnnnnnnnnnnnnnnnnnnnnnnnnnnnnnnnnnnnnnnnnnnnnnnnnnnnnnnnnnnnnnnnnnnnnnnnnnnnnnnnnnnnnnnnnnnnnnnnnnnnnnnnnnnnnnnnnnnnnnnnnnnnnnnnnnnnnnnnnnnnnnnnnnnnnnnnnnnnnnnnnnnnnnnnnnnnnnnnnnnnnnnnnnnnnnnnnnnnnnnnnnnnnnnnnnnnnnnnnnnnnnnnnnnnnnnnnnnnnnnnnnnnnnnnnnnnnnnnnnnnnnnnnnnnnnnnnnnnnnnnnnnnnnnnnnnnnnnnnnnnnnnnnnnnnnnnnnnnnnnnnnnnnnnnnnnnnnnnnnnnnnnnnnnnnnnnnnnnnnnnnnnnnnnnnnnnnnnnnnnnnnnnnnnnnnnnnnnnnnnnnnnnnnnnnnnnnnnnnnnnnnnnnnnnnnnnnnnnnnnnnnnnnnnnnnnnnnnnnnnnnnnnnnnnnnnnnnnnnnnnnnnnnnnnnnnnnnnnnnnnnnnnnnnnnnnnnnnnnnnnnnnnnnnnnnnnnnnnnnnnnnnnnnnnnnnnnnnnnnnnnnnnnnnnnnnnnnnnnnnnnnnnnnnnnnnnnnnnnnnnnnnnnnnnnnnnnnnnnnnnnnnnnnnnnnnnnnnnnnnnnnnnnnnnnnnnnnnnnnnnnnnnnnnnnnnnnnnnnnnnnnnnnnnnnnnnnnnnnnnnnnnnnnnnnnnnnnnnnnnnnnnnnnnnnnnnnnnnnnnnnnnnnnnnnnnnnnnnnnnnnnnnnnnnnnnnnnnnnnnnnnnnnnnnnnnnnnnnnnnnnnnnnnnnnnnnnnnnnnnnnnnnnnnnnnnnnnnnnnnnnnnnnnnnnnnnnnnnnnnnnnnnnnnnnnnnnnnnnnnnnnnnnnnnnnnnnnnnnnnnnnnnnnnnnnnnnnnnnnnnnnnnnnnnnnnnnnnnnnnnnnnnnnnnnnnnnnnnnnnnnnnnnnnnnnnnnnnnnnnnnnnnnnnnnnnnnnnnnnnnnnnnnnnnnnnnnnnnnnnnnnnnnnnnnnnnnnnnnnnnnnnnnnnnnnnnnnnnnnnnnnnnnnnnnnnnnnnnnnnnnnnnnnnnnnnnnnnnnnnnnnnnnnnnnnnnnnnnnnnnnnnnnnnnnnnnnnnnnnnnnnnnnnnnnnnnnnnnnnnnnnnnnnnnnnnnnnnnnnnnnnnnnnnnnnnnnnnnnnnnnnnnnnnnnnnnnnnnnnnnnnnnnnnnnnnnnnnnnnnnnnnnnnnnnnnnnnnnnnnnnnnnnnnnnnnnnnnnnnnnnnnnnnnnnnnnnnnnnnnnnnnnnnnnnnnnnnnnnnnnnnnnnnnnnnnnnnnnnnnnnnnnnnnnnnnnnnnnnnnnnnnnnnnnnnnnnnnnnnnnnnnnnnnnnnnnnnnnnnnnnnnnnnnnnnnnnnnnnnnnnnnnnnnnnnnnnnnnnnnnnnnnnnnnnnnnnnnnnnnnnnnnnnnnnnnnnnnnnnnnnnnnnnnnnnnnnnnnnnnnnnnnnnnnnnnnnnnnnnnnnnnnnnnnnnnnnnnnnnnnnnnnnnnnnnnnnnnnnnnnnnnnnnnnnnnnnnnnnnnnnnnnnnnnnnnnnnnnnnnnnnnnnnnnnnnnnnnnnnnnnnnnnnnnnnnnnnnnnnnnnnnnnnnnnnnnnnnnnnnnnnnnnnnnnnnnnnnnnnnnnnnnnnnnnnnnnnnnnnnnnnnnnnnnnnnnnnnnnnnnnnnnnnnnnnnnnnnnnnnnnnnnnnnnnnnnnnnnnnnnnnnnnnnnnnnnnnnnnnnnnnnnnnnnnnnnnnnnnnnnnnnnnnnnnnnnnnnnnnnnnnnnnnnnnnnnnnnnnnnnnnnnnnnnnnnnnnnnnnnnnnnnnnnnnnnnnnnnnnnnnnnnnnnnnnnnnnnnnnnnnnnnnnnnnnnnnnnnnnnnnnnnnnnnnnnnnnnnnnnnnnnnnnnnnnnnnnnnnnnnnnnnnnnnnnnnnnnnnnnnnnnnnnnnnnnnnnnnnnnnnnnnnnnnnnnnnnnnnnnnnnnnnnnnnnnnnnnnnnnnnnnnnnnnnnnnnnnnnnnnnnnnnnnnnnnnnnnnnnnnnnnnnnnnnnnnnnnnnnnnnnnnnnnnnnnnnnnnnnnnnnnnnnnnnnnnnnnnnnnnnnnnnnnnnnnnnnnnnnnnnnnnnnnnnnnnnnnnnnnnnnnnnnnnnnnnnnnnnnnnnnnnnnnnnnnnnnnnnnnnnnnnnnnnnnnnnnnnnnnnnnnnnnnnnnnnnnnnnnnnnnnnnnnnnnnnnnnnnnnnnnnnnnnnnnnnnnnnnnnnnnnnnnnnnnnnnnnnnnnnnnnnnnnnnnnnnnnnnnnnnnnnnnnnnnnnnnnnnnnnnnnnnnnnnnnnnnnnnnnnnnnnnnnnnnnnnnnnnnnnnnnnnnnnnnnnnnnnnnnnnnnnnnnnnnnnnnnnnnnnnnnnnnnnnnnnnnnnnnnnnnnnnnnnnnnnnnnnnnnnnnnnnnnnnnnnnnnnnnnnnnnnnnnnnnnnnnnnnnnnnnnnnnnnnnnnnnnnnnnnnnnnnnnnnnnnnnnnnnnnnnnnnnnnnnnnnnnnnnnnnnnnnnnnnnnnnnnnnnnnnnnnnnnnnnnnnnnnnnnnnnnnnnnnnnnnnnnnnnnnnnnnnnnnnnnnnnnnnnnnnnnnnnnnnnnnnnnnnnnnnnnnnnnnnnnnnnnnnnnnnnnnnnnnnnnnnnnnnnnnnnnnnnnnnnnnnnnnnnnnnnnnnnnnnnnnnnnnnnnnnnnnnnnnnnnnnnnnnnnnnnnnnnnnnnnnnnnnnnnnnnnnnnnnnnnnnnnnnnnnnnnnnnnnnnnnnnnnnnnnnnnnnnnnnnnnnnnnnnnnnnnnnnnnnnnnnnnnnnnnnnnnnnnnnnnnnnnnnnnnnnnnnnnnnnnnnnnnnnnnnnnnnnnnnnnnnnnnnnnnnnnnnnnnnnnnnnnnnnnnnnnnnnnnnnnnnnnnnnnnnnnnnnnnnnnnnnnnnnnnnnnnnnnnnnnnnnnnnnnnnnnnnnnnnnnnnnnnnnnnnnnnnnnnnnnnnnnnnnnnnnnnnnnnnnnnnnnnnnnnnnnnnnnnnnnnnnnnnnnnnnnnnnnnnnnnnnnnnnnnnnnnnnnnnnnnnnnnnnnnnnnnnnnnnnnnnnnnnnnnnnnnnnnnnnnnnnnnnnnnnnnnnnnnnnnnnnnnnnnnnnnnnnnnnnnnnnnnnnnnnnnnnnnnnnnnnnnnnnnnnnnnnnnnnnnnnnnnnnnnnnnnnnnnnnnnnnnnnnnnnnnnnnnnnnnnnnnnnnnnnnnnnnnnnnnnnnnnnnnnnnnnnnnnnnnnnnnnnnnnnnnnnnnnnnnnnnnnnnnnnnnnnnnnnnnnnnnnnnnnnnnnnnnnnnnnnnnnnnnnnnnnnnnnnnnnnnnnnnnnnnnnnnnnnnnnnnnnnnnnnnnnnnnnnnnnnnnnnnnnnnnnnnnnnnnnnnnnnnnnnnnnnnnnnnnnnnnnnnnnnnnnnnnnnnnnnnnnnnnnnnnnnnnnnnnnnnnnnnnnnnnnnnnnnnnnnnnnnnnnnnnnnnnnnnnnnnnnnnnnnnnnnnnnnnnnnnnnnnnnnnnnnnnnnnnnnnnnnnnnnnnnnnnnnnnnnnnnnnnnnnnnnnnnnnnnnnnnnnnnnnnnnnnnnnnnnnnnnnnnnnnnnnnnnnnnnnnnnnnnnnnnnnnnnnnnnnnnnnnnnnnnnnnnnnnnnnnnnnnnnnnnnnnnnnnnnnnnnnnnnnnnnnnnnnnnnnnnnnnnnnnnnnnnnnnnnnnnnnnnnnnnnnnnnnnnnnnnnnnnnnnnnnnnnnnnnnnnnnnnnnnnnnnnnnnnnnnnnnnnnnnnnnnnnnnnnnnnnnnnnnnnnnnnnnnnnnnnnnnnnnnnnnnnnnnnnnnnnnnnnnnnnnnnnnnnnnnnnnnnnnnnnnnnnnnnnnnnnnnnnnnnnnnnnnnnnnnnnnnnnnnnnnnnnnnnnnnnnnnnnnnnnnnnnnnnnnnnnnnnnnnnnnnnnnnnnnnnnnnnnnnnnnnnnnnnnnnnnnnnnnnnnnnnnnnnnnnnnnnnnnnnnnnnnnnnnnnnnnnnnnnnnnnnnnnnnnnnnnnnnnnnnnnnnnnnnnnnnnnnnnnnnnnnnnnnnnnnnnnnnnnnnnnnnnnnnnnnnnnnnnnnnnnnnnnnnnnnnnnnnnnnnnnnnnnnnnnnnnnnnnnnnnnnnnnnnnnnnnnnnnnnnnnnnnnnnnnnnnnnnnnnnnnnnnnnnnnnnnnnnnnnnnnnnnnnnnnnnnnnnnnnnnnnnnnnnnnnnnnnnnnnnnnnnnnnnnnnnnnnnnnnnnnnnnnnnnnnnnnnnnnnnnnnnnnnnnnnnnnnnnnnnnnnnnnnnnnnnnnnnnnnnnnnnnnnnnnnnnnnnnnnnnnnnnnnnnnnnnnnnnnnnnnnnnnnnnnnnnnnnnnnnnnnnnnnnnnnnnnnnnnnnnnnnnnnnnnnnnnnnnnnnnnnnnnnnnnnnnnnnnnnnnnnnnnnnnnnnnnnnnnnnnnnnnnnnnnnnnnnnnnnnnnnnnnnnnnnnnnnnnnnnnnnnnnnnnnnnnnnnnnnnnnnnnnnnnnnnnnnnnnnnnnnnnnnnnnnnnnnnnnnnnnnnnnnnnnnnnnnnnnnnnnnnnnnnnnnnnnnnnnnnnnnnnnnnnnnnnnnnnnnnnnnnnnnnnnnnnnnnnnnnnnnnnnnnnnnnnnnnnnnnnnnnnnnnnnnnnnnnnnnnnnnnnnnnnnnnnnnnnnnnnnnnnnnnnnnnnnnnnnnnnnnnnnnnnnnnnnnnnnnnnnnnnnnnnnnnnnnnnnnnnnnnnnnnnnnnnnnnnnnnnnnnnnnnnnnnnnnnnnnnnnnnnnnnnnnnnnnnnnnnnnnnnnnnnnnnnnnnnnnnnnnnnnnnnnnnnnnnnnnnnnnnnnnnnnnnnnnnnnnnnnnnnnnnnnnnnnnnnnnnnnnnnnnnnnnnnnnnnnnnnnnnnnnnnnnnnnnnnnnnnnnnnnnnnnnnnnnnnnnnnnnnnnnnnnnnnnnnnnnnnnnnnnnnnnnnnnnnnnnnnnnnnnnnnnnnnnnnnnnnnnnnnnnnnnnnnnnnnnnnnnnnnnnnnnnnnnnnnnnnnnnnnnnnnnnnnnnnnnnnnnnnnnnnnnnnnnnnnnnnnnnnnnnnnnnnnnnnnnnnnnnnnnnnnnnnnnnnnnnnnnnnnnnnnnnnnnnnnnnnnnnnnnnnnnnnnnnnnnnnnnnnnnnnnnnnnnnnnnnnnnnnnnnnnnnnnnnnnnnnnnnnnnnnnnnnnnnnnnnnnnnnnnnnnnnnnnnnnnnnnnnnnnnnnnnnnnnnnnnnnnnnnnnnnnnnnnnnnnnnnnnnnnnnnnnnnnnnnnnnnnnnnnnnnnnnnnnnnnnnnnnnnnnnnnnnnnnnnnnnnnnnnnnnnnnnnnnnnnnnnnnnnnnnnnnnnnnnnnnnnnnnnnnnnnnnnnnnnnnnnnnnnnnnnnnnnnnnnnnnnnnnnnnnnnnnnnnnnnnnnnnnnnnnnnnnnnnnnnnnnnnnnnnnnnnnnnnnnnnnnnnnnnnnnnnnnnnnnnnnnnnnnnnnnnnnnnnnnnnnnnnnnnnnnnnnnnnnnnnnnnnnnnnnnnnnnnnnnnnnnnnnnnnnnnnnnnnnnnnnnnnnnnnnnnnnnnnnnnnnnnnnnnnnnnnnnnnnnnnnnnnnnnnnnnnnnnnnnnnnnnnnnnnnnnnnnnnnnnnnnnnnnnnnnnnnnnnnnnnnnnnnnnnnnnnnnnnnnnnnnnnnnnnnnnnnnnnnnnnnnnnnnnnnnnnnnnnnnnnnnnnnnnnnnnnnnnnnnnnnnnnnnnnnnnnnnnnnnnnnnnnnnnnnnnnnnnnnnnnnnnnnnnnnnnnnnnnnnnnnnnnnnnnnnnnnnnnnnnnnnnnnnnnnnnnnnnnnnnnnnnnnnnnnnnnnnnnnnnnnnnnnnnnnnnnnnnnnnnnnnnnnnnnnnnnnnnnnnnnnnnnnnnnnnnnnnnnnnnnnnnnnnnnnnnnnnnnnnnnnnnnnnnnnnnnnnnnnnnnnnnnnnnnnnnnnnnnnnnnnnnnnnnnnnnnnnnnnnnnnnnnnnnnnnnnnnnnnnnnnnnnnnnnnnnnnnnnnnnnnnnnnnnnnnnnnnnnnnnnnnnnnnnnnnnnnnnnnnnnnnnnnnnnnnnnnnnnnnnnnnnnnnnnnnnnnnnnnnnnnnnnnnnnnnnnnnnnnnnnnnnnnnnnnnnnnnnnnnnnnnnnnnnnnnnnnnnnnnnnnnnnnnnnnnnnnnnnnnnnnnnnnnnnnnnnnnnnnnnnnnnnnnnnnnnnnnnnnnnnnnnnnnnnnnnnnnnnnnnnnnnnnnnnnnnnnnnnnnnnnnnnnnnnnnnnnnnnnnnnnnnnnnnnnnnnnnnnnnnnnnnnnnnnnnnnnnnnnnnnnnnnnnnnnnnnnnnnnnnnnnnnnnnnnnnnnnnnnnnnnnnnnnnnnnnnnnnnnnnnnnnnnnnnnnnnnnnnnnnnnnnnnnnnnnnnnnnnnnnnnnnnnnnnnnnnnnnnnnnnnnnnnnnnnnnnnnnnnnnnnnnnnnnnnnnnnnnnnnnnnnnnnnnnnnnnnnnnnnnnnnnnnnnnnnnnnnnnnnnnnnnnnnnnnnnnnnnnnnnnnnnnnnnnnnnnnnnnnnnnnnnnnnnnnnnnnnnnnnnnnnnnnnnnnnnnnnnnnnnnnnnnnnnnnnnnnnnnnnnnnnnnnnnnnnnnnnnnnnnnnnnnnnnnnnnnnnnnnnnnnnnnnnnnnnnnnnnnnnnnnnnnnnnnnnnnnnnnnnnnnnnnnnnnnnnnnnnnnnnnnnnnnnnnnnnnnnnnnnnnnnnnnnnnnnnnnnnnnnnnnnnnnnnnnnnnnnnnnnnnnnnnnnnnnnnnnnnnnnnnnnnnnnnnnnnnnnnnnnnnnnnnnnnnnnnnnnnnnnnnnnnnnnnnnnnnnnnnnnnnnnnnnnnnnnnnnnnnnnnnnnnnnnnnnnnnnnnnnnnnnnnnnnnnnnnnnnnnnnnnnnnnnnnnnnnnnnnnnnnnnnnnnnnnnnnnnnnnnnnnnnnnnnnnnnnnnnnnnnnnnnnnnnnnnnnnnnnnnnnnnnnnnnnnnnnnnnnnnnnnnnnnnnnnnnnnnnnnnnnnnnnnnnnnnnnnnnnnnnnnnnnnnnnnnnnnnnnnnnnnnnnnnnnnnnnnnnnnnnnnnnnnnnnnnnnnnnnnnnnnnnnnnnnnnnnnnnnnnnnnnnnnnnnnnnnnnnnnnnnnnnnnnnnnnnnnnnnnnnnnnnnnnnnnnnnnnnnnnnnnnnnnnnnnnnnnnnnnnnnnnnnnnnnnnnnnnnnnnnnnnnnnnnnnnnnnnnnnnnnnnnnnnnnnnnnnnnnnnnnnnnnnnnnnnnnnnnnnnnnnnnnnnnnnnnnnnnnnnnnnnnnnnnnnnnnnnnnnnnnnnnnnnnnnnnnnnnnnnnnnnnnnnnnnnnnnnnnnnnnnnnnnnnnnnnnnnnnnnnnnnnnnnnnnnnnnnnnnnnnnnnnnnnnnnnnnnnnnnnnnnnnnnnnnnnnnnnnnnnnnnnnnnnnnnnnnnnnnnnnnnnnnnnnnnnnnnnnnnnnnnnnnnnnnnnnnnnnnnnnnnnnnnnnnnnnnnnnnnnnnnnnnnnnnnnnnnnnnnnnnnnnnnnnnnnnnnnnnnnnnnnnnnnnnnnnnnnnnnnnnnnnnnnnnnnnnnnnnnnnnnnnnnnnnnnnnnnnnnnnnnnnnnnnnnnnnnnnnnnnnnnnnnnnnnnnnnnnnnnnnnnnnnnnnnnnnnnnnnnnnnnnnnnnnnnnnnnnnnnnnnnnnnnnnnnnnnnnnnnnnnnnnnnnnnnnnnnnnnnnnnnnnnnnnnnnnnnnnnnnnnnnnnnnnnnnnnnnnnnnnnnnnnnnnnnnnnnnnnnnnnnnnnnnnnnnnnnnnnnnnnnnnnnnnnnnnnnnnnnnnnnnnnnnnnnnnnnnnnnnnnnnnnnnnnnnnnnnnnnnnnnnnnnnnnnnnnnnnnnnnnnnnnnnnnnnnnnnnnnnnnnnnnnnnnnnnnnnnnnnnnnnnnnnnnnnnnnnnnnnnnnnnnnnnnnnnnnnnnnnnnnnnnnnnnnnnnnnnnnnnnnnnnnnnnnnnnnnnnnnnnnnnnnnnnnnnnnnnnnnnnnnnnnnnnnnnnnnnnnnnnnnnnnnnnnnnnnnnnnnnnnnnnnnnnnnnnnnnnnnnnnnnnnnnnnnnnnnnnnnnnnnnnnnnnnnnnnnnnnnnnnnnnnnnnnnnnnnnnnnnnnnnnnnnnnnnnnnnnnnnnnnnnnnnnnnnnnnnnnnnnnnnnnnnnnnnnnnnnnnnnnnnnnnnnnnnnnnnnnnnnnnnnnnnnnnnnnnnnnnnnnnnnnnnnnnnnnnnnnnnnnnnnnnnnnnnnnnnnnnnnnnnnnnnnnnnnnnnnnnnnnnnnnnnnnnnnnnnnnnnnnnnnnnnnnnnnnnnnnnnnnnnnnnnnnnnnnnnnnnnnnnnnnnnnnnnnnnnnnnnnnnnnnnnnnnnnnnnnnnnnnnnnnnnnnnnnnnnnnnnnnnnnnnnnnnnnnnnnnnnnnnnnnnnnnnnnnnnnnnnnnnnnnnnnnnnnnnnnnnnnnnnnnnnnnnnnnnnnnnnnnnnnnnnnnnnnnnnnnnnnnnnnnnnnnnnnnnnnnnnnnnnnnnnnnnnnnnnnnnnnnnnnnnnnnnnnnnnnnnnnnnnnnnnnnnnnnnnnnnnnnnnnnnnnnnnnnnnnnnnnnnnnnnnnnnnnnnnnnnnnnnnnnnnnnnnnnnnnnnnnnnnnnnnnnnnnnnnnnnnnnnnnnnnnnnnnnnnnnnnnnnnnnnnnnnnnnnnnnnnnnnnnnnnnnnnnnnnnnnnnnnnnnnnnnnnnnnnnnnnnnnnnnnnnnnnnnnnnnnnnnnnnnnnnnnnnnnnnnnnnnnnnnnnnnnnnnnnnnnnnnnnnnnnnnnnnnnnnnnnnnnnnnnnnnnnnnnnnnnnnnnnnnnnnnnnnnnnnnnnnnnnnnnnnnnnnnnnnnnnnnnnnnnnnnnnnnnnnnnnnnnnnnnnnnnnnnnnnnnnnnnnnnnnnnnnnnnnnnnnnnnnnnnnnnnnnnnnnnnnnnnnnnnnnnnnnnnnnnnnnnnnnnnnnnnnnnnnnnnnnnnnnnnnnnnnnnnnnnnnnnnnnnnnnnnnnnnnnnnnnnnnnnnnnnnnnnnnnnnnnnnnnnnnnnnnnnnnnnnnnnnnnnnnnnnnnnnnnnnnnnnnnnnnnnnnnnnnnnnnnnnnnnnnnnnnnnnnnnnnnnnnnnnnnnnnnnnnnnnnnnnnnnnnnnnnnnnnnnnnnnnnnnnnnnnnnnnnnnnnnnnnnnnnnnnnnnnnnnnnnnnnnnnnnnnnnnnnnnnnnnnnnnnnnnnnnnnnnnnnnnnnnnnnnnnnnnnnnnnnnnnnnnnnnnnnnnnnnnnnnnnnnnnnnnnnnnnnnnnnnnnnnnnnnnnnnnnnnnnnnnnnnnnnnnnnnnnnnnnnnnnnnnnnnnnnnnnnnnnnnnnnnnnnnnnnnnnnnnnnnnnnnnnnnnnnnnnnnnnnnnnnnnnnnnnnnnnnnnnnnnnnnnnnnnnnnnnnnnnnnnnnnnnnnnnnnnnnnnnnnnnnnnnnnnnnnnnnnnnnnnnnnnnnnnnnnnnnnnnnnnnnnnnnnnnnnnnnnnnnnnnnnnnnnnnnnnnnnnnnnnnnnnnnnnnnnnnnnnnnnnnnnnnnnnnnnnnnnnnnnnnnnnnnnnnnnnnnnnnnnnnnnnnnnnnnnnnnnnnnnnnnnnnnnnnnnnnnnnnnnnnnnnnnnnnnnnnnnnnnnnnnnnnnnnnnnnnnnnnnnnnnnnnnnnnnnnnnnnnnnnnnnnnnnnnnnnnnnnnnnnnnnnnnnnnnnnnnnnnnnnnnnnnnnnnnnnnnnnnnnnnnnnnnnnnnnnnnnnnnnnnnnnnnnnnnnnnnnnnnnnnnnnnnnnnnnnnnnnnnnnnnnnnnnnnnnnnnnnnnnnnnnnnnnnnnnnnnnnnnnnnnnnnnnnnnnnnnnnnnnnnnnnnnnnnnnnnnnnnnnnnnnnnnnnnnnnnnnnnnnnnnnnnnnnnnnnnnnnnnnnnnnnnnnnnnnnnnnnnnnnnnnnnnnnnnnnnnnnnnnnnnnnnnnnnnnnnnnnnnnnnnnnnnnnnnnnnnnnnnnnnnnnnnnnnnnnnnnnnnnnnnnnnnnnnnnnnnnnnnnnnnnnnnnnnnnnnnnnnnnnnnnnnnnnnnnnnnnnnnnnnnnnnnnnnnnnnnnnnnnnnnnnnnnnnnnnnnnnnnnnnnnnnnnnnnnnnnnnnnnnnnnnnnnnnnnnnnnnnnnnnnnnnnnnnnnnnnnnnnnnnnnnnnnnnnnnnnnnnnnnnnnnnnnnnnnnnnnnnnnnnnnnnnnnnnnnnnnnnnnnnnnnnnnnnnnnnnnnnnnnnnnnnnnnnnnnnnnnnnnnnnnnnnnnnnnnnnnnnnnnnnnnnnnnnnnnnnnnnnnnnnnnnnnnnnnnnnnnnnnnnnnnnnnnnnnnnnnnnnnnnnnnnnnnnnnnnnnnnnnnnnnnnnnnnnnnnnnnnnnnnnnnnnnnnnnnnnnnnnnnnnnnnnnnnnnnnnnnnnnnnnnnnnnnnnnnnnnnnnnnnnnnnnnnnnnnnnnnnnnnnnnnnnnnnnnnnnnnnnnnnnnnnnnnnnnnnnnnnnnnnnnnnnnnnnnnnnnnnnnnnnnnnnnnnnnnnnnnnnnnnnnnnnnnnnnnnnnnnnnnnnnnnnnnnnnnnnnnnnnnnnnnnnnnnnnnnnnnnnnnnnnnnnnnnnnnnnnnnnnnnnnnnnnnnnnnnnnnnnnnnnnnnnnnnnnnnnnnnnnnnnnnnnnnnnnnnnnnnnnnnnnnnnnnnnnnnnnnnnnnnnnnnnnnnnnnnnnnnnnnnnnnnnnnnnnnnnnnnnnnnnnnnnnnnnnnnnnnnnnnnnnnnnnnnnnnnnnnnnnnnnnnnnnnnnnnnnnnnnnnnnnnnnnnnnnnnnnnnnnnnnnnnnnnnnnnnnnnnnnnnnnnnnnnnnnnnnnnnnnnnnnnnnnnnnnnnnnnnnnnnnnnnnnnnnnnnnnnnnnnnnnnnnnnnnnnnnnnnnnnnnnnnnnnnnnnnnnnnnnnnnnnnnnnnnnnnnnnnnnnnnnnnnnnnnnnnnnnnnnnnnnnnnnnnnnnnnnnnnnnnnnnnnnnnnnnnnnnnnnnnnnnnnnnnnnnnnnnnnnnnnnnnnnnnnnnnnnnnnnnnnnnnnnnnnnnnnnnnnnnnnnnnnnnnnnnnnnnnnnnnnnnnnnnnnnnnnnnnnnnnnnnnnnnnnnnnnnnnnnnnnnnnnnnnnnnnnnnnnnnnnnnnnnnnnnnnnnnnnnnnnnnnnnnnnnnnnnnnnnnnnnnnnnnnnnnnnnnnnnnnnnnnnnnnnnnnnnnnnnnnnnnnnnnnnnnnnnnnnnnnnnnnnnnnnnnnnnnnnnnnnnnnnnnnnnnnnnnnnnnnnnnnnnnnnnnnnnnnnnnnnnnnnnnnnnnnnnnnnnnnnnnnnnnnnnnnnnnnnnnnnnnnnnnnnnnnnnnnnnnnnnnnnnnnnnnnnnnnnnnnnnnnnnnnnnnnnnnnnnnnnnnnnnnnnnnnnnnnnnnnnnnnnnnnnnnnnnnnnnnnnnnnnnnnnnnnnnnnnnnnnnnnnnnnnnnnnnnnnnnnnnnnnnnnnnnnnnnnnnnnnnnnnnnnnnnnnnnnnnnnnnnnnnnnnnnnnnnnnnnnnnnnnnnnnnnnnnnnnnnnnnnnnnnnnnnnnnnnnnnnnnnnnnnnnnnnnnnnnnnnnnnnnnnnnnnnnnnnnnnnnnnnnnnnnnnnnnnnnnnnnnnnnnnnnnnnnnnnnnnnnnnnnnnnnnnnnnnnnnnnnnnnnnnnnnnnnnnnnnnnnnnnnnnnnnnnnnnnnnnnnnnnnnnnnnnnnnnnnnnnnnnnnnnnnnnnnnnnnnnnnnnnnnnnnnnnnnnnnnnnnnnnnnnnnnnnnnnnnnnnnnnnnnnnnnnnnnnnnnnnnnnnnnnnnnnnnnnnnnnnnnnnnnnnnnnnnnnnnnnnnnnnnnnnnnnnnnnnnnnnnnnnnnnnnnnnnnnnnnnnnnnnnnnnnnnnnnnnnnnnnnnnnnnnnnnnnnnnnnnnnnnnnnnnnnnnnnnnnnnnnnnnnnnnnnnnnnnnnnnnnnnnnnnnnnnnnnnnnnnnnnnnnnnnnnnnnnnnnnnnnnnnnnnnnnnnnnnnnnnnnnnnnnnnnnnnnnnnnnnnnnnnnnnnnnnnnnnnnnnnnnnnnnnnnnnnnnnnnnnnnnnnnnnnnnnnnnnnnnnnnnnnnnnnnnnnnnnnnnnnnnnnnnnnnnnnnnnnnnnnnnnnnnnnnnnnnnnnnnnnnnnnnnnnnnnnnnnnnnnnnnnnnnnnnnnnnnnnnnnnnnnnnnnnnnnnnnnnnnnnnnnnnnnnnnnnnnnnnnnnnnnnnnnnnnnnnnnnnnnnnnnnnnnnnnnnnnnnnnnnnnnnnnnnnnnnnnnnnnnnnnnnnnnnnnnnnnnnnnnnnnnnnnnnnnnnnnnnnnnnnnnnnnnnnnnnnnnnnnnnnnnnnnnnnnnnnnnnnnnnnnnnnnnnnnnnnnnnnnnnnnnnnnnnnnnnnnnnnnnnnnnnnnnnnnnnnnnnnnnnnnnnnnnnnnnnnnnnnnnnnnnnnnnnnnnnnnnnnnnnnnnnnnnnnnnnnnnnnnnnnnnnnnnnnnnnnnnnnnnnnnnnnnnnnnnnnnnnnnnnnnnnnnnnnnnnnnnnnnnnnnnnnnnnnnnnnnnnnnnnnnnnnnnnnnnnnnnnnnnnnnnnnnnnnnnnnnnnnnnnnnnnnnnnnnnnnnnnnnnnnnnnnnnnnnnnnnnnnnnnnnnnnnnnnnnnnnnnnnnnnnnnnnnnnnnnnnnnnnnnnnnnnnnnnnnnnnnnnnnnnnnnnnnnnnnnnnnnnnnnnnnnnnnnnnnnnnnnnnnnnnnnnnnnnnnnnnnnnnnnnnnnnnnnnnnnnnnnnnnnnnnnnnnnnnnnnnnnnnnnnnnnnnnnnnnnnnnnnnnnnnnnnnnnnnnnnnnnnnnnnnnnnnnnnnnnnnnnnnnnnnnnnnnnnnnnnnnnnnnnnnnnnnnnnnnnnnnnnnnnnnnnnnnnnnnnnnnnnnnnnnnnnnnnnnnnnnnnnnnnnnnnnnnnnnnnnnnnnnnnnnnnnnnnnnnnnnnnnnnnnnnnnnnnnnnnnnnnnnnnnnnnnnnnnnnnnnnnnnnnnnnnnnnnnnnnnnnnnnnnnnnnnnnnnnnnnnnnnnnnnnnnnnnnnnnnnnnnnnnnnnnnnnnnnnnnnnnnnnnnnnnnnnnnnnnnnnnnnnnnnnnnnnnnnnnnnnnnnnnnnnnnnnnnnnnnnnnnnnnnnnnnnnnnnnnnnnnnnnnnnnnnnnnnnnnnnnnnnnnnnnnnnnnnnnnnnnnnnnnnnnnnnnnnnnnnnnnnnnnnnnnnnnnnnnnnnnnnnnnnnnnnnnnnnnnnnnnnnnnnnnnnnnnnnnnnnnnnnnnnnnnnnnnnnnnnnnnnnnnnnnnnnnnnnnnnnnnnnnnnnnnnnnnnnnnnnnnnnnnnnnnnnnnnnnnnnnnnnnnnnnnnnnnnnnnnnnnnnnnnnnnnnnnnnnnnnnnnnnnnnnnnnnnnnnnnnnnnnnnnnnnnnnnnnnnnnnnnnnnnnnnnnnnnnnnnnnnnnnnnnnnnnnnnnnnnnnnnnnnnnnnnnnnnnnnnnnnnnnnnnnnnnnnnnnnnnnnnnnnnnnnnnnnnnnnnnnnnnnnnnnnnnnnnnnnnnnnnnnnnnnnnnnnnnnnnnnnnnnnnnnnnnnnnnnnnnnnnnnnnnnnnnnnnnnnnnnnnnnnnnnnnnnnnnnnnnnnnnnnnnnnnnnnnnnnnnnnnnnnnnnnnnnnnnnnnnnnnnnnnnnnnnnnnnnnnnnnnnnnnnnnnnnnnnnnnnnnnnnnnnnnnnnnnnnnnnnnnnnnnnnnnnnnnnnnnnnnnnnnnnnnnnnnnnnnnnnnnnnnnnnnnnnnnnnnnnnnnnnnnnnnnnnnnnnnnnnnnnnnnnnnnnnnnnnnnnnnnnnnnnnnnnnnnnnnnnnnnnnnnnnnnnnnnnnnnnnnnnnnnnnnnnnnnnnnnnnnnnnnnnnnnnnnnnnnnnnnnnnnnnnnnnnnnnnnnnnnnnnnnnnnnnnnnnnnnnnnnnnnnnnnnnnnnnnnnnnnnnnnnnnnnnnnnnnnnnnnnnnnnnnnnnnnnnnnnnnnnnnnnnnnnnnnnnnnnnnnnnnnnnnnnnnnnnnnnnnnnnnnnnnnnnnnnnnnnnnnnnnnnnnnnnnnnnnnnnnnnnnnnnnnnnnnnnnnnnnnnnnnnnnnnnnnnnnnnnnnnnnnnnnnnnnnnnnnnnnnnnnnnnnnnnnnnnnnnnnnnnnnnnnnnnnnnnnnnnnnnnnnnnnnnnnnnnnnnnnnnnnnnnnnnnnnnnnnnnnnnnnnnnnnnnnnnnnnnnnnnnnnnnnnnnnnnnnnnnnnnnnnnnnnnnnnnnnnnnnnnnnnnnnnnnnnnnnnnnnnnnnnnnnnnnnnnnnnnnnnnnnnnnnnnnnnnnnnnnnnnnnnnnnnnnnnnnnnnnnnnnnnnnnnnnnnnnnnnnnnnnnnnnnnnnnnnnnnnnnnnnnnnnnnnnnnnnnnnnnnnnnnnnnnnnnnnnnnnnnnnnnnnnnnnnnnnnnnnnnnnnnnnnnnnnnnnnnnnnnnnnnnnnnnnnnnnnnnnnnnnnnnnnnnnnnnnnnnnnnnnnnnnnnnnnnnnnnnnnnnnnnnnnnnnnnnnnnnnnnnnnnnnnnnnnnnnnnnnnnnnnnnnnnnnnnnnnnnnnnnnnnnnnnnnnnnnnnnnnnnnnnnnnnnnnnnnnnnnnnnnnnnnnnnnnnnnnnnnnnnnnnnnnnnnnnnnnnnnnnnnnnnnnnnnnnnnnnnnnnnnnnnnnnnnnnnnnnnnnnnnnnnnnnnnnnnnnnnnnnnnnnnnnnnnnnnnnnnnnnnnnnnnnnnnnnnnnnnnnnnnnnnnnnnnnnnnnnnnnnnnnnnnnnnnnnnnnnnnnnnnnnnnnnnnnnnnnnnnnnnnnnnnnnnnnnnnnnnnnnnnnnnnnnnnnnnnnnnnnnnnnnnnnnnnnnnnnnnnnnnnnnnnnnnnnnnnnnnnnnnnnnnnnnnnnnnnnnnnnnnnnnnnnnnnnnnnnnnnnnnnnnnnnnnnnnnnnnnnnnnnnnnnnnnnnnnnnnnnnnnnnnnnnnnnnnnnnnnnnnnnnnnnnnnnnnnnnnnnnnnnnnnnnnnnnnnnnnnnnnnnnnnnnnnnnnnnnnnnnnnnnnnnnnnnnnnnnnnnnnnnnnnnnnnnnnnnnnnnnnnnnnnnnnnnnnnnnnnnnnnnnnnnnnnnnnnnnnnnnnnnnnnnnnnnnnnnnnnnnnnnnnnnnnnnnnnnnnnnnnnnnnnnnnnnnnnnnnnnnnnnnnnnnnnnnnnnnnnnnnnnnnnnnnnnnnnnnnnnnnnnnnnnnnnnnnnnnnnnnnnnnnnnnnnnnnnnnnnnnnnnnnnnnnnnnnnnnnnnnnnnnnnnnnnnnnnnnnnnnnnnnnnnnnnnnnnnnnnnnnnnnnnnnnnnnnnnnnnnnnnnnnnnnnnnnnnnnnnnnnnnnnnnnnnnnnnnnnnnnnnnnnnnnnnnnnnnnnnnnnnnnnnnnnnnnnnnnnnnnnnnnnnnnnnnnnnnnnnnnnnnnnnnnnnnnnnnnnnnnnnnnnnnnnnnnnnnnnnnnnnnnnnnnnnnnnnnnnnnnnnnnnnnnnnnnnnnnnnnnnnnnnnnnnnnnnnnnnnnnnnnnnnnnnnnnnnnnnnnnnnnnnnnnnnnnnnnnnnnnnnnnnnnnnnnnnnnnnnnnnnnnnnnnnnnnnnnnnnnnnnnnnnnnnnnnnnnnnnnnnnnnnnnnnnnnnnnnnnnnnnnnnnnnnnnnnnnnnnnnnnnnnnnnnnnnnnnnnnnnnnnnnnnnnnnnnnnnnnnnnnnnnnnnnnnnnnnnnnnnnnnnnnnnnnnnnnnnnnnnnnnnnnnnnnnnnnnnnnnnnnnnnnnnnnnnnnnnnnnnnnnnnnnnnnnnnnnnnnnnnnnnnnnnnnnnnnnnnnnnnnnnnnnnnnnnnnnnnnnnnnnnnnnnnnnnnnnnnnnnnnnnnnnnnnnnnnnnnnnnnnnnnnnnnnnnnnnnnnnnnnnnnnnnnnnnnnnnnnnnnnnnnnnnnnnnnnnnnnnnnnnnnnnnnnnnnnnnnnnnnnnnnnnnnnnnnnnnnnnnnnnnnnnnnnnnnnnnnnnnnnnnnnnnnnnnnnnnnnnnnnnnnnnnnnnnnnnnnnnnnnnnnnnnnnnnnnnnnnnnnnnnnnnnnnnnnnnnnnnnnnnnnnnnnnnnnnnnnnnnnnnnnnnnnnnnnnnnnnnnnnnnnnnnnnnnnnnnnnnnnnnnnnnnnnnnnnnnnnnnnnnnnnnnnnnnnnnnnnnnnnnnnnnnnnnnnnnnnnnnnnnnnnnnnnnnnnnnnnnnnnnnnnnnnnnnnnnnnnnnnnnnnnnnnnnnnnnnnnnnnnnnnnnnnnnnnnnnnnnnnnnnnnnnnnnnnnnnnnnnnnnnnnnnnnnnnnnnnnnnnnnnnnnnnnnnnnnnnnnnnnnnnnnnnnnnnnnnnnnnnnnnnnnnnnnnnnnnnnnnnnnnnnnnnnnnnnnnnnnnnnnnnnnnnnnnnnnnnnnnnnnnnnnnnnnnnnnnnnnnnnnnnnnnnnnnnnnnnnnnnnnnnnnnnnnnnnnnnnnnnnnnnnnnnnnnnnnnnnnnnnnnnnnnnnnnnnnnnnnnnnnnnnnnnnnnnnnnnnnnnnnnnnnnnnnnnnnnnnnnnnnnnnnnnnnnnnnnnnnnnnnnnnnnnnnnnnnnnnnnnnnnnnnnnnnnnnnnnnnnnnnnnnnnnnnnnnnnnnnnnnnnnnnnnnnnnnnnnnnnnnnnnnnnnnnnnnnnnnnnnnnnnnnnnnnnnnnnnnnnnnnnnnnnnnnnnnnnnnnnnnnnnnnnnnnnnnnnnnnnnnnnnnnnnnnnnnnnnnnnnnnnnnnnnnnnnnnnnnnnnnnnnnnnnnnnnnnnnnnnnnnnnnnnnnnnnnnnnnnnnnnnnnnnnnnnnnnnnnnnnnnnnnnnnnnnnnnnnnnnnnnnnnnnnnnnnnnnnnnnnnnnnnnnnnnnnnnnnnnnnnnnnnnnnnnnnnnnnnnnnnnnnnnnnnnnnnnnnnnnnnnnnnnnnnnnnnnnnnnnnnnnnnnnnnnnnnnnnnnnnnnnnnnnnnnnnnnnnnnnnnnnnnnnnnnnnnnnnnnnnnnnnnnnnnnnnnnnnnnnnnnnnnnnnnnnnnnnnnnnnnnnnnnnnnnnnnnnnnnnnnnnnnnnnnnnnnnnnnnnnnnnnnnnnnnnnnnnnnnnnnnnnnnnnnnnnnnnnnnnnnnnnnnnnnnnnnnnnnnnnnnnnnnnnnnnnnnnnnnnnnnnnnnnnnnnnnnnnnnnnnnnnnnnnnnnnnnnnnnnnnnnnnnnnnnnnnnnnnnnnnnnnnnnnnnnnnnnnnnnnnnnnnnnnnnnnnnnnnnnnnnnnnnnnnnnnnnnnnnnnnnnnnnnnnnnnnnnnnnnnnnnnnnnnnnnnnnnnnnnnnnnnnnnnnnnnnnnnnnnnnnnnnnnnnnnnnnnnnnnnnnnnnnnnnnnnnnnnnnnnnnnnnnnnnnnnnnnnnnnnnnnnnnnnnnnnnnnnnnnnnnnnnnnnnnnnnnnnnnnnnnnnnnnnnnnnnnnnnnnnnnnnnnnnnnnnnnnnnnnnnnnnnnnnnnnnnnnnnnnnnnnnnnnnnnnnnnnnnnnnnnnnnnnnnnnnnnnnnnnnnnnnnnnnnnnnnnnnnnnnnnnnnnnnnnnnnnnnnnnnnnnnnnnnnnnnnnnnnnnnnnnnnnnnnnnnnnnnnnnnnnnnnnnnnnnnnnnnnnnnnnnnnnnnnnnnnnnnnnnnnnnnnnnnnnnnnnnnnnnnnnnnnnnnnnnnnnnnnnnnnnnnnnnnnnnnnnnnnnnnnnnnnnnnnnnnnnnnnnnnnnnnnnnnnnnnnnnnnnnnnnnnnnnnnnnnnnnnnnnnnnnnnnnnnnnnnnnnnnnnnnnnnnnnnnnnnnnnnnnnnnnnnnnnnnnnnnnnnnnnnnnnnnnnnnnnnnnnnnnnnnnnnnnnnnnnnnnnnnnnnnnnnnnnnnnnnnnnnnnnnnnnnnnnnnnnnnnnnnnnnnnnnnnnnnnnnnnnnnnnnnnnnnnnnnnnnnnnnnnnnnnnnnnnnnnnnnnnnnnnnnnnnnnnnnnnnnnnnnnnnnnnnnnnnnnnnnnnnnnnnnnnnnnnnnnnnnnnnnnnnnnnnnnnnnnnnnnnnnnnnnnnnnnnnnnnnnnnnnnnnnnnnnnnnnnnnnnnnnnnnnnnnnnnnnnnnnnnnnnnnnnnnnnnnnnnnnnnnnnnnnnnnnnnnnnnnnnnnnnnnnnnnnnnnnnnnnnnnnnnnnnnnnnnnnnnnnnnnnnnnnnnnnnnnnnnnnnnnnnnnnnnnnnnnnnnnnnnnnnnnnnnnnnnnnnnnnnnnnnnnnnnnnnnnnnnnnnnnnnnnnnnnnnnnnnnnnnnnnnnnnnnnnnnnnnnnnnnnnnnnnnnnnnnnnnnnnnnnnnnnnnnnnnnnnnnnnnnnnnnnnnnnnnnnnnnnnnnnnnnnnnnnnnnnnnnnnnnnnnnnnnnnnnnnnnnnnnnnnnnnnnnnnnnnnnnnnnnnnnnnnnnnnnnnnnnnnnnnnnnnnnnnnnnnnnnnnnnnnnnnnnnnnnnnnnnnnnnnnnnnnnnnnnnnnnnnnnnnnnnnnnnnnnnnnnnnnnnnnnnnnnnnnnnnnnnnnnnnnnnnnnnnnnnnnnnnnnnnnnnnnnnnnnnnnnnnnnnnnnnnnnnnnnnnnnnnnnnnnnnnnnnnnnnnnnnnnnnnnnnnnnnnnnnnnnnnnnnnnnnnnnnnnnnnnnnnnnnnnnnnnnnnnnnnnnnnnnnnnnnnnnnnnnnnnnnnnnnnnnnnnnnnnnnnnnnnnnnnnnnnnnnnnnnnnnnnnnnnnnnnnnnnnnnnnnnnnnnnnnnnnnnnnnnnnnnnnnnnnnnnnnnnnnnnnnnnnnnnnnnnnnnnnnnnnnnnnnnnnnnnnnnnnnnnnnnnnnnnnnnnnnnnnnnnnnnnnnnnnnnnnnnnnnnnnnnnnnnnnnnnnnnnnnnnnnnnnnnnnnnnnnnnnnnnnnnnnnnnnnnnnnnnnnnnnnnnnnnnnnnnnnnnnnnnnnnnnnnnnnnnnnnnnnnnnnnnnnnnnnnnnnnnnnnnnnnnnnnnnnnnnnnnnnnnnnnnnnnnnnnnnnnnnnnnnnnnnnnnnnnnnnnnnnnnnnnnnnnnnnnnnnnnnnnnnnnnnnnnnnnnnnnnnnnnnnnnnnnnnnnnnnnnnnnnnnnnnnnnnnnnnnnnnnnnnnnnnnnnnnnnnnnnnnnnnnnnnnnnnnnnnnnnnnnnnnnnnnnnnnnnnnnnnnnnnnnnnnnnnnnnnnnnnnnnnnnnnnnnnnnnnnnnnnnnnnnnnnnnnnnnnnnnnnnnnnnnnnnnnnnnnnnnnnnnnnnnnnnnnnnnnnnnnnnnnnnnnnnnnnnnnnnnnnnnnnnnnnnnnnnnnnnnnnnnnnnnnnnnnnnnnnnnnnnnnnnnnnnnnnnnnnnnnnnnnnnnnnnnnnnnnnnnnnnnnnnnnnnnnnnnnnnnnnnnnnnnnnnnnnnnnnnnnnnnnnnnnnnnnnnnnnnnnnnnnnnnnnnnnnnnnnnnnnnnnnnnnnnnnnnnnnnnnnnnnnnnnnnnnnnnnnnnnnnnnnnnnnnnnnnnnnnnnnnnnnnnnnnnnnnnnnnnnnnnnnnnnnnnnnnnnnnnnnnnnnnnnnnnnnnnnnnnnnnnnnnnnnnnnnnnnnnnnnnnnnnnnnnnnnnnnnnnnnnnnnnnnnnnnnnnnnnnnnnnnnnnnnnnnnnnnnnnnnnnnnnnnnnnnnnnnnnnnnnnnnnnnnnnnnnnnnnnnnnnnnnnnnnnnnnnnnnnnnnnnnnnnnnnnnnnnnnnnnnnnnnnnnnnnnnnnnnnnnnnnnnnnnnnnnnnnnnnnnnnnnnnnnnnnnnnnnnnnnnnnnnnnnnnnnnnnnnnnnnnnnnnnnnnnnnnnnnnnnnnnnnnnnnnnnnnnnnnnnnnnnnnnnnnnnnnnnnnnnnnnnnnnnnnnnnnnnnnnnnnnnnnnnnnnnnnnnnnnnnnnnnnnnnnnnnnnnnnnnnnnnnnnnnnnnnnnnnnnnnnnnnnnnnnnnnnnnnnnnnnnnnnnnnnnnnnnnnnnnnnnnnnnnnnnnnnnnnnnnnnnnnnnnnnnnnnnnnnnnnnnnnnnnnnnnnnnnnnnnnnnnnnnnnnnnnnnnnnnnnnnnnnnnnnnnnnnnnnnnnnnnnnnnnnnnnnnnnnnnnnnnnnnnnnnnnnnnnnnnnnnnnnnnnnnnnnnnnnnnnnnnnnnnnnnnnnnnnnnnnnnnnnnnnnnnnnnnnnnnnnnnnnnnnnnnnnnnnnnnnnnnnnnnnnnnnnnnnnnnnnnnnnnnnnnnnnnnnnnnnnnnnnnnnnnnnnnnnnnnnnnnnnnnnnnnnnnnnnnnnnnnnnnnnnnnnnnnnnnnnnnnnnnnnnnnnnnnnnnnnnnnnnnnnnnnnnnnnnnnnnnnnnnnnnnnnnnnnnnnnnnnnnnnnnnnnnnnnnnnnnnnnnnnnnnnnnnnnnnnnnnnnnnnnnnnnnnnnnnnnnnnnnnnnnnnnnnnnnnnnnnnnnnnnnnnnnnnnnnnnnnnnnnnnnnnnnnnnnnnnnnnnnnnnnnnnnnnnnnnnnnnnnnnnnnnnnnnnnnnnnnnnnnnnnnnnnnnnnnnnnnnnnnnnnnnnnnnnnnnnnnnnnnnnnnnnnnnnnnnnnnnnnnnnnnnnnnnnnnnnnnnnnnnnnnnnnnnnnnnnnnnnnnnnnnnnnnnnnnnnnnnnnnnnnnnnnnnnnnnnnnnnnnnnnnnnnnnnnnnnnnnnnnnnnnnnnnnnnnnnnnnnnnnnnnnnnnnnnnnnnnnnnnnnnnnnnnnnnnnnnnnnnnnnnnnnnnnnnnnnnnnnnnnnnnnnnnnnnnnnnnnnnnnnnnnnnnnnnnnnnnnnnnnnnnnnnnnnnnnnnnnnnnnnnnnnnnnnnnnnnnnnnnnnnnnnnnnnnnnnnnnnnnnnnnnnnnnnnnnnnnnnnnnnnnnnnnnnnnnnnnnnnnnnnnnnnnnnnnnnnnnnnnnnnnnnnnnnnnnnnnnnnnnnnnnnnnnnnnnnnnnnnnnnnnnnnnnnnnnnnnnnnnnnnnnnnnnnnnnnnnnnnnnnnnnnnnnnnnnnnnnnnnnnnnnnnnnnnnnnnnnnnnnnnnnnnnnnnnnnnnnnnnnnnnnnnnnnnnnnnnnnnnnnnnnnnnnnnnnnnnnnnnnnnnnnnnnnnnnnnnnnnnnnnnnnnnnnnnnnnnnnnnnnnnnnnnnnnnnnnnnnnnnnnnnnnnnnnnnnnnnnnnnnnnnnnnnnnnnnnnnnnnnnnnnnnnnnnnnnnnnnnnnnnnnnnnnnnnnnnnnnnnnnnnnnnnnnnnnnnnnnnnnnnnnnnnnnnnnnnnnnnnnnnnnnnnnnnnnnnnnnnnnnnnnnnnnnnnnnnnnnnnnnnnnnnnnnnnnnnnnnnnnnnnnnnnnnnnnnnnnnnnnnnnnnnnnnnnnnnnnnnnnnnnnnnnnnnnnnnnnnnnnnnnnnnnnnnnnnnnnnnnnnnnnnnnnnnnnnnnnnnnnnnnnnnnnnnnnnnnnnnnnnnnnnnnnnnnnnnnnnnnnnnnnnnnnnnnnnnnnnnnnnnnnnnnnnnnnnnnnnnnnnnnnnnnnnnnnnnnnnnnnnnnnnnnnnnnnnnnnnnnnnnnnnnnnnnnnnnnnnnnnnnnnnnnnnnnnnnnnnnnnnnnnnnnnnnnnnnnnnnnnnnnnnnnnnnnnnnnnnnnnnnnnnnnnnnnnnnnnnnnnnnnnnnnnnnnnnnnnnnnnnnnnnnnnnnnnnnnnnnnnnnnnnnnnnnnnnnnnnnnnnnnnnnnnnnnnnnnnnnnnnnnnnnnnnnnnnnnnnnnnnnnnnnnnnnnnnnnnnnnnnnnnnnnnnnnnnnnnnnnnnnnnnnnnnnnnnnnnnnnnnnnnnnnnnnnnnnnnnnnnnnnnnnnnnnnnnnnnnnnnnnnnnnnnnnnnnnnnnnnnnnnnnnnnnnnnnnnnnnnnnnnnnnnnnnnnnnnnnnnnnnnnnnnnnnnnnnnnnnnnnnnnnnnnnnnnnnnnnnnnnnnnnnnnnnnnnnnnnnnnnnnnnnnnnnnnnnnnnnnnnnnnnnnnnnnnnnnnnnnnnnnnnnnnnnnnnnnnnnnnnnnnnnnnnnnnnnnnnnnnnnnnnnnnnnnnnnnnnnnnnnnnnnnnnnnnnnnnnnnnnnnnnnnnnnnnnnnnnnnnnnnnnnnnnnnnnnnnnnnnnnnnnnnnnnnnnnnnnnnnnnnnnnnnnnnnnnnnnnnnnnnnnnnnnnnnnnnnnnnnnnnnnnnnnnnnnnnnnnnnnnnnnnnnnnnnnnnnnnnnnnnnnnnnnnnnnnnnnnnnnnnnnnnnnnnnnnnnnnnnnnnnnnnnnnnnnnnnnnnnnnnnnnnnnnnnnnnnnnnnnnnnnnnnnnnnnnnnnnnnnnnnnnnnnnnnnnnnnnnnnnnnnnnnnnnnnnnnnnnnnnnnnnnnnnnnnnnnnnnnnnnnnnnnnnnnnnnnnnnnnnnnnnnnnnnnnnnnnnnnnnnnnnnnnnnnnnnnnnnnnnnnnnnnnnnnnnnnnnnnnnnnnnnnnnnnnnnnnnnnnnnnnnnnnnnnnnnnnnnnnnnnnnnnnnnnnnnnnnnnnnnnnnnnnnnnnnnnnnnnnnnnnnnnnnnnnnnnnnnnnnnnnnnnnnnnnnnnnnnnnnnnnnnnnnnnnnnnnnnnnnnnnnnnnnnnnnnnnnnnnnnnnnnnnnnnnnnnnnnnnnnnnnnnnnnnnnnnnnnnnnnnnnnnnnnnnnnnnnnnnnnnnnnnnnnnnnnnnnnnnnnnnnnnnnnnnnnnnnnnnnnnnnnnnnnnnnnnnnnnnnnnnnnnnnnnnnnnnnnnnnnnnnnnnnnnnnnnnnnnnnnnnnnnnnnnnnnnnnnnnnnnnnnnnnnnnnnnnnnnnnnnnnnnnnnnnnnnnnnnnnnnnnnnnnnnnnnnnnnnnnnnnnnnnnnnnnnnnnnnnnnnnnnnnnnnnnnnnnnnnnnnnnnnnnnnnnnnnnnnnnnnnnnnnnnnnnnnnnnnnnnnnnnnnnnnnnnnnnnnnnnnnnnnnnnnnnnnnnnnnnnnnnnnnnnnnnnnnnnnnnnnnnnnnnnnnnnnnnnnnnnnnnnnnnnnnnnnnnnnnnnnnnnnnnnnnnnnnnnnnnnnnnnnnnnnnnnnnnnnnnnnnnnnnnnnnnnnnnnnnnnnnnnnnnnnnnnnnnnnnnnnnnnnnnnnnnnnnnnnnnnnnnnnnnnnnnnnnnnnnnnnnnnnnnnnnnnnnnnnnnnnnnnnnnnnnnnnnnnnnnnnnnnnnnnnnnnnnnnnnnnnnnnnnnnnnnnnnnnnnnnnnnnnnnnnnnnnnnnnnnnnnnnnnnnnnnnnnnnnnnnnnnnnnnnnnnnnnnnnnnnnnnnnnnnnnnnnnnnnnnnnnnnnnnnnnnnnnnnnnnnnnnnnnnnnnnnnnnnnnnnnnnnnnnnnnnnnnnnnnnnnnnnnnnnnnnnnnnnnnnnnnnnnnnnnnnnnnnnnnnnnnnnnnnnnnnnnnnnnnnnnnnnnnnnnnnnnnnnnnnnnnnnnnnnnnnnnnnnnnnnnnnnnnnnnnnnnnnnnnnnnnnnnnnnnnnnnnnnnnnnnnnnnnnnnnnnnnnnnnnnnnnnnnnnnnnnnnnnnnnnnnnnnnnnnnnnnnnnnnnnnnnnnnnnnnnnnnnnnnnnnnnnnnnnnnnnnnnnnnnnnnnnnnnnnnnnnnnnnnnnnnnnnnnnnnnnnnnnnnnnnnnnnnnnnnnnnnnnnnnnnnnnnnnnnnnnnnnnnnnnnnnnnnnnnnnnnnnnnnnnnnnnnnnnnnnnnnnnnnnnnnnnnnnnnnnnnnnnnnnnnnnnnnnnnnnnnnnnnnnnnnnnnnnnnnnnnnnnnnnnnnnnnnnnnnnnnnnnnnnnnnnnnnnnnnnnnnnnnnnnnnnnnnnnnnnnnnnnnnnnnnnnnnnnnnnnnnnnnnnnnnnnnnnnnnnnnnnnnnnnnnnnnnnnnnnnnnnnnnnnnnnnnnnnnnnnnnnnnnnnnnnnnnnnnnnnnnnnnnnnnnnnnnnnnnnnnnnnnnnnnnnnnnnnnnnnnnnnnnnnnnnnnnnnnnnnnnnnnnnnnnnnnnnnnnnnnnnnnnnnnnnnnnnnnnnnnnnnnnnnnnnnnnnnnnnnnnnnnnnnnnnnnnnnnnnnnnnnnnnnnnnnnnnnnnnnnnnnnnnnnnnnnnnnnnnnnnnnnnnnnnnnnnnnnnnnnnnnnnnnnnnnnnnnnnnnnnnnnnnnnnnnnnnnnnnnnnnnnnnnnnnnnnnnnnnnnnnnnnnnnnnnnnnnnnnnnnnnnnnnnnnnnnnnnnnnnnnnnnnnnnnnnnnnnnnnnnnnnnnnnnnnnnnnnnnnnnnnnnnnnnnnnnnnnnnnnnnnnnnnnnnnnnnnnnnnnnnnnnnnnnnnnnnnnnnnnnnnnnnnnnnnnnnnnnnnnnnnnnnnnnnnnnnnnnnnnnnnnnnnnnnnnnnnnnnnnnnnnnnnnnnnnnnnnnnnnnnnnnnnnnnnnnnnnnnnnnnnnnnnnnnnnnnnnnnnnnnnnnnnnnnnnnnnnnnnnnnnnnnnnnnnnnnnnnnnnnnnnnnnnnnnnnnnnnnnnnnnnnnnnnnnnnnnnnnnnnnnnnnnnnnnnnnnnnnnnnnnnnnnnnnnnnnnnnnnnnnnnnnnnnnnnnnnnnnnnnnnnnnnnnnnnnnnnnnnnnnnnnnnnnnnnnnnnnnnnnnnnnnnnnnnnnnnnnnnnnnnnnnnnnnnnnnnnnnnnnnnnnnnnnnnnnnnnnnnnnnnnnnnnnnnnnnnnnnnnnnnnnnnnnnnnnnnnnnnnnnnnnnnnnnnnnnnnnnnnnnnnnnnnnnnnnnnnnnnnnnnnnnnnnnnnnnnnnnnnnnnnnnnnnnnnnnnnnnnnnnnnnnnnnnnnnnnnnnnnnnnnnnnnnnnnnnnnnnnnnnnnnnnnnnnnnnnnnnnnnnnnnnnnnnnnnnnnnnnnnnnnnnnnnnnnnnnnnnnnnnnnnnnnnnnnnnnnnnnnnnnnnnnnnnnnnnnnnnnnnnnnnnnnnnnnnnnnnnnnnnnnnnnnnnnnnnnnnnnnnnnnnnnnnnnnnnnnnnnnnnnnnnnnnnnnnnnnnnnnnnnnnnnnnnnnnnnnnnnnnnnnnnnnnnnnnnnnnnnnnnnnnnnnnnnnnnnnnnnnnnnnnnnnnnnnnnnnnnnnnnnnnnnnnnnnnnnnnnnnnnnnnnnnnnnnnnnnnnnnnnnnnnnnnnnnnnnnnnnnnnnnnnnnnnnnnnnnnnnnnnnnnnnnnnnnnnnnnnnnnnnnnnnnnnnnnnnnnnnnnnnnnnnnnnnnnnnnnnnnnnnnnnnnnnnnnnnnnnnnnnnnnnnnnnnnnnnnnnnnnnnnnnnnnnnnnnnnnnnnnnnnnnnnnnnnnnnnnnnnnnnnnnnnnnnnnnnnnnnnnnnnnnnnnnnnnnnnnnnnnnnnnnnnnnnnnnnnnnnnnnnnnnnnnnnnnnnnnnnnnnnnnnnnnnnnnnnnnnnnnnnnnnnnnnnnnnnnnnnnnnnnnnnnnnnnnnnnnnnnnnnnnnnnnnnnnnnnnnnnnnnnnnnnnnnnnnnnnnnnnnnnnnnnnnnnnnnnnnnnnnnnnnnnnnnnnnnnnnnnnnnnnnnnnnnnnnnnnnnnnnnnnnnnnnnnnnnnnnnnnnnnnnnnnnnnnnnnnnnnnnnnnnnnnnnnnnnnnnnnnnnnnnnnnnnnnnnnnnnnnnnnnnnnnnnnnnnnnnnnnnnnnnnnnnnnnnnnnnnnnnnnnnnnnnnnnnnnnnnnnnnnnnnnnnnnnnnnnnnnnnnnnnnnnnnnnnnnnnnnnnnnnnnnnnnnnnnnnnnnnnnnnnnnnnnnnnnnnnnnnnnnnnnnnnnnnnnnnnnnnnnnnnnnnnnnnnnnnnnnnnnnnnnnnnnnnnnnnnnnnnnnnnnnnnnnnnnnnnnnnnnnnnnnnnnnnnnnnnnnnnnnnnnnnnnnnnnnnnnnnnnnnnnnnnnnnnnnnnnnnnnnnnnnnnnnnnnnnnnnnnnnnnnnnnnnnnnnnnnnnnnnnnnnnnnnnnnnnnnnnnnnnnnnnnnnnnnnnnnnnnnnnnnnnnnnnnnnnnnnnnnnnnnnnnnnnnnnnnnnnnnnnnnnnnnnnnnnnnnnnnnnnnnnnnnnnnnnnnnnnnnnnnnnnnnnnnnnnnnnnnnnnnnnnnnnnnnnnnnnnnnnnnnnnnnnnnnnnnnnnnnnnnnnnnnnnnnnnnnnnnnnnnnnnnnnnnnnnnnnnnnnnnnnnnnnnnnnnnnnnnnnnnnnnnnnnnnnnnnnnnnnnnnnnnnnnnnnnnnnnnnnnnnnnnnnnnnnnnnnnnnnnnnnnnnnnnnnnnnnnnnnnnnnnnnnnnnnnnnnnnnnnnnnnnnnnnnnnnnnnnnnnnnnnnnnnnnnnnnnnnnnnnnnnnnnnnnnnnnnnnnnnnnnnnnnnnnnnnnnnnnnnnnnnnnnnnnnnnnnnnnnnnnnnnnnnnnnnnnnnnnnnnnnnnnnnnnnnnnnnnnnnnnnnnnnnnnnnnnnnnnnnnnnnnnnnnnnnnnnnnnnnnnnnnnnnnnnnnnnnnnnnnnnnnnnnnnnnnnnnnnnnnnnnnnnnnnnnnnnnnnnnnnnnnnnnnnnnnnnnnnnnnnnnnnnnnnnnnnnnnnnnnnnnnnnnnnnnnnnnnnnnnnnnnnnnnnnnnnnnnnnnnnnnnnnnnnnnnnnnnnnnnnnnnnnnnnnnnnnnnnnnnnnnnnnnnnnnnnnnnnnnnnnnnnnnnnnnnnnnnnnnnnnnnnnnnnnnnnnnnnnnnnnnnnnnnnnnnnnnnnnnnnnnnnnnnnnnnnnnnnnnnnnnnnnnnnnnnnnnnnnnnnnnnnnnnnnnnnnnnnnnnnnnnnnnnnnnnnnnnnnnnnnnnnnnnnnnnnnnnnnnnnnnnnnnnnnnnnnnnnnnnnnnnnnnnnnnnnnnnnnnnnnnnnnnnnnnnnnnnnnnnnnnnnnnnnnnnnnnnnnnnnnnnnnnnnnnnnnnnnnnnnnnnnnnnnnnnnnnnnnnnnnnnnnnnnnnnnnnnnnnnnnnnnnnnnnnnnnnnnnnnnnnnnnnnnnnnnnnnnnnnnnnnnnnnnnnnnnnnnnnnnnnnnnnnnnnnnnnnnnnnnnnnnnnnnnnnnnnnnnnnnnnnnnnnnnnnnnnnnnnnnnnnnnnnnnnnnnnnnnnnnnnnnnnnnnnnnnnnnnnnnnnnnnnnnnnnnnnnnnnnnnnnnnnnnnnnnnnnnnnnnnnnnnnnnnnnnnnnnnnnnnnnnnnnnnnnnnnnnnnnnnnnnnnnnnnnnnnnnnnnnnnnnnnnnnnnnnnnnnnnnnnnnnnnnnnnnnnnnnnnnnnnnnnnnnnnnnnnnnnnnnnnnnnnnnnnnnnnnnnnnnnnnnnnnnnnnnnnnnnnnnnnnnnnnnnnnnnnnnnnnnnnnnnnnnnnnnnnnnnnnnnnnnnnnnnnnnnnnnnnnnnnnnnnnnnnnnnnnnnnnnnnnnnnnnnnnnnnnnnnnnnnnnnnnnnnnnnnnnnnnnnnnnnnnnnnnnnnnnnnnnnnnnnnnnnnnnnnnnnnnnnnnnnnnnnnnnnnnnnnnnnnnnnnnnnnnnnnnnnnnnnnnnnnnnnnnnnnnnnnnnnnnnnnnnnnnnnnnnnnnnnnnnnnnnnnnnnnnnnnnnnnnnnnnnnnnnnnnnnnnnnnnnnnnnnnnnnnnnnnnnnnnnnnnnnnnnnnnnnnnnnnnnnnnnnnnnnnnnnnnnnnnnnnnnnnnnnnnnnnnnnnnnnnnnnnnnnnnnnnnnnnnnnnnnnnnnnnnnnnnnnnnnnnnnnnnnnnnnnnnnnnnnnnnnnnnnnnnnnnnnnnnnnnnnnnnnnnnnnnnnnnnnnnnnnnnnnnnnnnnnnnnnnnnnnnnnnnnnnnnnnnnnnnnnnnnnnnnnnnnnnnnnnnnnnnnnnnnnnnnnnnnnnnnnnnnnnnnnnnnnnnnnnnnnnnnnnnnnnnnnnnnnnnnnnnnnnnnnnnnnnnnnnnnnnnnnnnnnnnnnnnnnnnnnnnnnnnnnnnnnnnnnnnnnnnnnnnnnnnnnnnnnnnnnnnnnnnnnnnnnnnnnnnnnnnnnnnnnnnnnnnnnnnnnnnnnnnnnnnnnnnnnnnnnnnnnnnnnnnnnnnnnnnnnnnnnnnnnnnnnnnnnnnnnnnnnnnnnnnnnnnnnnnnnnnnnnnnnnnnnnnnnnnnnnnnnnnnnnnnnnnnnnnnnnnnnnnnnnnnnnnnnnnnnnnnnnnnnnnnnnnnnnnnnnnnnnnnnnnnnnnnnnnnnnnnnnnnnnnnnnnnnnnnnnnnnnnnnnnnnnnnnnnnnnnnnnnnnnnnnnnnnnnnnnnnnnnnnnnnnnnnnnnnnnnnnnnnnnnnnnnnnnnnnnnnnnnnnnnnnnnnnnnnnnnnnnnnnnnnnnnnnnnnnnnnnnnnnnnnnnnnnnnnnnnnnnnnnnnnnnnnnnnnnnnnnnnnnnnnnnnnnnnnnnnnnnnnnnnnnnnnnnnnnnnnnnnnnnnnnnnnnnnnnnnnnnnnnnnnnnnnnnnnnnnnnnnnnnnnnnnnnnnnnnnnnnnnnnnnnnnnnnnnnnnnnnnnnnnnnnnnnnnnnnnnnnnnnnnnnnnnnnnnnnnnnnnnnnnnnnnnnnnnnnnnnnnnnnnnnnnnnnnnnnnnnnnnnnnnnnnnnnnnnnnnnnnnnnnnnnnnnnnnnnnnnnnnnnnnnnnnnnnnnnnnnnnnnnnnnnnnnnnnnnnnnnnnnnnnnnnnnnnnnnnnnnnnnnnnnnnnnnnnnnnnnnnnnnnnnnnnnnnnnnnnnnnnnnnnnnnnnnnnnnnnnnnnnnnnnnnnnnnnnnnnnnnnnnnnnnnnnnnnnnnnnnnnnnnnnnnnnnnnnnnnnnnnnnnnnnnnnnnnnnnnnnnnnnnnnnnnnnnnnnnnnnnnnnnnnnnnnnnnnnnnnnnnnnnnnnnnnnnnnnnnnnnnnnnnnnnnnnnnnnnnnnnnnnnnnnnnnnnnnnnnnnnnnnnnnnnnnnnnnnnnnnnnnnnnnnnnnnnnnnnnnnnnnnnnnnnnnnnnnnnnnnnnnnnnnnnnnnnnnnnnnnnnnnnnnnnnnnnnnnnnnnnnnnnnnnnnnnnnnnnnnnnnnnnnnnnnnnnnnnnnnnnnnnnnnnnnnnnnnnnnnnnnnnnnnnnnnnnnnnnnnnnnnnnnnnnnnnnnnnnnnnnnnnnnnnnnnnnnnnnnnnnnnnnnnnnnnnnnnnnnnnnnnnnnnnnnnnnnnnnnnnnnnnnnnnnnnnnnnnnnnnnnnnnnnnnnnnnnnnnnnnnnnnnnnnnnnnnnnnnnnnnnnnnnnnnnnnnnnnnnnnnnnnnnnnnnnnnnnnnnnnnnnnnnnnnnnnnnnnnnnnnnnnnnnnnnnnnnnnnnnnnnnnnnnnnnnnnnnnnnnnnnnnnnnnnnnnnnnnnnnnnnnnnnnnnnnnnnnnnnnnnnnnnnnnnnnnnnnnnnnnnnnnnnnnnnnnnnnnnnnnnnnnnnnnnnnnnnnnnnnnnnnnnnnnnnnnnnnnnnnnnnnnnnnnnnnnnnnnnnnnnnnnnnnnnnnnnnnnnnnnnnnnnnnnnnnnnnnnnnnnnnnnnnnnnnnnnnnnnnnnnnnnnnnnnnnnnnnnnnnnnnnnnnnnnnnnnnnnnnnnnnnnnnnnnnnnnnnnnnnnnnnnnnnnnnnnnnnnnnnnnnnnnnnnnnnnnnnnnnnnnnnnnnnnnnnnnnnnnnnnnnnnnnnnnnnnnnnnnnnnnnnnnnnnnnnnnnnnnnnnnnnnnnnnnnnnnnnnnnnnnnnnnnnnnnnnnnnnnnnnnnnnnnnnnnnnnnnnnnnnnnnnnnnnnnnnnnnnnnnnnnnnnnnnnnnnnnnnnnnnnnnnnnnnnnnnnnnnnnnnnnnnnnnnnnnnnnnnnnnnnnnnnnnnnnnnnnnnnnnnnnnnnnnnnnnnnnnnnnnnnnnnnnnnnnnnnnnnnnnnnnnnnnnnnnnnnnnnnnnnnnnnnnnnnnnnnnnnnnnnnnnnnnnnnnnnnnnnnnnnnnnnnnnnnnnnnnnnnnnnnnnnnnnnnnnnnnnnnnnnnnnnnnnnnnnnnnnnnnnnnnnnnnnnnnnnnnnnnnnnnnnnnnnnnnnnnnnnnnnnnnnnnnnnnnnnnnnnnnnnnnnnnnnnnnnnnnnnnnnnnnnnnnnnnnnnnnnnnnnnnnnnnnnnnnnnnnnnnnnnnnnnnnnnnnnnnnnnnnnnnnnnnnnnnnnnnnnnnnnnnnnnnnnnnnnnnnnnnnnnnnnnnnnnnnnnnnnnnnnnnnnnnnnnnnnnnnnnnnnnnnnnnnnnnnnnnnnnnnnnnnnnnnnnnnnnnnnnnnnnnnnnnnnnnnnnnnnnnnnnnnnnnnnnnnnnnnnnnnnnnnnnnnnnnnnnnnnnnnnnnnnnnnnnnnnnnnnnnnnnnnnnnnnnnnnnnnnnnnnnnnnnnnnnnnnnnnnnnnnnnnnnnnnnnnnnnnnnnnnnnnnnnnnnnnnnnnnnnnnnnnnnnnnnnnnnnnnnnnnnnnnnnnnnnnnnnnnnnnnnnnnnnnnnnnnnnnnnnnnnnnnnnnnnnnnnnnnnnnnnnnnnnnnnnnnnnnnnnnnnnnnnnnnnnnnnnnnnnnnnnnnnnnnnnnnnnnnnnnnnnnnnnnnnnnnnnnnnnnnnnnnnnnnnnnnnnnnnnnnnnnnnnnnnnnnnnnnnnnnnnnnnnnnnnnnnnnnnnnnnnnnnnnnnnnnnnnnnnnnnnnnnnnnnnnnnnnnnnnnnnnnnnnnnnnnnnnnnnnnnnnnnnnnnnnnnnnnnnnnnnnnnnnnnnnnnnnnnnnnnnnnnnnnnnnnnnnnnnnnnnnnnnnnnnnnnnnnnnnnnnnnnnnnnnnnnnnnnnnnnnnnnnnnnnnnnnnnnnnnnnnnnnnnnnnnnnnnnnnnnnnnnnnnnnnnnnnnnnnnnnnnnnnnnnnnnnnnnnnnnnnnnnnnnnnnnnnnnnnnnnnnnnnnnnnnnnnnnnnnnnnnnnnnnnnnnnnnnnnnnnnnnnnnnnnnnnnnnnnnnnnnnnnnnnnnnnnnnnnnnnnnnnnnnnnnnnnnnnnnnnnnnnnnnnnnnnnnnnnnnnnnnnnnnnnnnnnnnnnnnnnnnnnnnnnnnnnnnnnnnnnnnnnnnnnnnnnnnnnnnnnnnnnnnnnnnnnnnnnnnnnnnnnnnnnnnnnnnnnnnnnnnnnnnnnnnnnnnnnnnnnnnnnnnnnnnnnnnnnnnnnnnnnnnnnnnnnnnnnnnnnnnnnnnnnnnnnnnnnnnnnnnnnnnnnnnnnnnnnnnnnnnnnnnnnnnnnnnnnnnnnnnnnnnnnnnnnnnnnnnnnnnnnnnnnnnnnnnnnnnnnnnnnnnnnnnnnnnnnnnnnnnnnnnnnnnnnnnnnnnnnnnnnnnnnnnnnnnnnnnnnnnnnnnnnnnnnnnnnnnnnnnnnnnnnnnnnnnnnnnnnnnnnnnnnnnnnnnnnnnnnnnnnnnnnnnnnnnnnnnnnnnnnnnnnnnnnnnnnnnnnnnnnnnnnnnnnnnnnnnnnnnnnnnnnnnnnnnnnnnnnnnnnnnnnnnnnnnnnnnnnnnnnnnnnnnnnnnnnnnnnnnnnnnnnnnnnnnnnnnnnnnnnnnnnnnnnnnnnnnnnnnnnnnnnnnnnnnnnnnnnnnnnnnnnnnnnnnnnnnnnnnnnnnnnnnnnnnnnnnnnnnnnnnnnnnnnnnnnnnnnnnnnnnnnnnnnnnnnnnnnnnnnnnnnnnnnnnnnnnnnnnnnnnnnnnnnnnnnnnnnnnnnnnnnnnnnnnnnnnnnnnnnnnnnnnnnnnnnnnnnnnnnnnnnnnnnnnnnnnnnnnnnnnnnnnnnnnnnnnnnnnnnnnnnnnnnnnnnnnnnnnnnnnnnnnnnnnnnnnnnnnnnnnnnnnnnnnnnnnnnnnnnnnnnnnnnnnnnnnnnnnnnnnnnnnnnnnnnnnnnnnnnnnnnnnnnnnnnnnnnnnnnnnnnnnnnnnnnnnnnnnnnnnnnnnnnnnnnnnnnnnnnnnnnnnnnnnnnnnnnnnnnnnnnnnnnnnnnnnnnnnnnnnnnnnnnnnnnnnnnnnnnnnnnnnnnnnnnnnnnnnnnnnnnnnnnnnnnnnnnnnnnnnnnnnnnnnnnnnnnnnnnnnnnnnnnnnnnnnnnnnnnnnnnnnnnnnnnnnnnnnnnnnnnnnnnnnnnnnnnnnnnnnnnnnnnnnnnnnnnnnnnnnnnnnnnnnnnnnnnnnnnnnnnnnnnnnnnnnnnnnnnnnnnnnnnnnnnnnnnnnnnnnnnnnnnnnnnnnnnnnnnnnnnnnnnnnnnnnnnnnnnnnnnnnnnnnnnnnnnnnnnnnnnnnnnnnnnnnnnnnnnnnnnnnnnnnnnnnnnnnnnnnnnnnnnnnnnnnnnnnnnnnnnnnnnnnnnnnnnnnnnnnnnnnnnnnnnnnnnnnnnnnnnnnnnnnnnnnnnnnnnnnnnnnnnnnnnnnnnnnnnnnnnnnnnnnnnnnnnnnnnnnnnnnnnnnnnnnnnnnnnnnnnnnnnnnnnnnnnnnnnnnnnnnnnnnnnnnnnnnnnnnnnnnnnnnnnnnnnnnnnnnnnnnnnnnnnnnnnnnnnnnnnnnnnnnnnnnnnnnnnnnnnnnnnnnnnnnnnnnnnnnnnnnnnnnnnnnnnnnnnnnnnnnnnnnnnnnnnnnnnnnnnnnnnnnnnnnnnnnnnnnnnnnnnnnnnnnnnnnnnnnnnnnnnnnnnnnnnnnnnnnnnnnnnnnnnnnnnnnnnnnnnnnnnnnnnnnnnnnnnnnnnnnnnnnnnnnnnnnnnnnnnnnnnnnnnnnnnnnnnnnnnnnnnnnnnnnnnnnnnnnnnnnnnnnnnnnnnnnnnnnnnnnnnnnnnnnnnnnnnnnnnnnnnnnnnnnnnnnnnnnnnnnnnnnnnnnnnnnnnnnnnnnnnnnnnnnnnnnnnnnnnnnnnnnnnnnnnnnnnnnnnnnnnnnnnnnnnnnnnnnnnnnnnnnnnnnnnnnnnnnnnnnnnnnnnnnnnnnnnnnnnnnnnnnnnnnnnnnnnnnnnnnnnnnnnnnnnnnnnnnnnnnnnnnnnnnnnnnnnnnnnnnnnnnnnnnnnnnnnnnnnnnnnnnnnnnnnnnnnnnnnnnnnnnnnnnnnnnnnnnnnnnnnnnnnnnnnnnnnnnnnnnnnnnnnnnnnnnnnnnnnnnnnnnnnnnnnnnnnnnnnnnnnnnnnnnnnnnnnnnnnnnnnnnnnnnnnnnnnnnnnnnnnnnnnnnnnnnnnnnnnnnnnnnnnnnnnnnnnnnnnnnnnnnnnnnnnnnnnnnnnnnnnnnnnnnnnnnnnnnnnnnnnnnnnnnnnnnnnnnnnnnnnnnnnnnnnnnnnnnnnnnnnnnnnnnnnnnnnnnnnnnnnnnnnnnnnnnnnnnnnnnnnnnnnnnnnnnnnnnnnnnnnnnnnnnnnnnnnnnnnnnnnnnnnnnnnnnnnnnnnnnnnnnnnnnnnnnnnnnnnnnnnnnnnnnnnnnnnnnnnnnnnnnnnnnnnnnnnnnnnnnnnnnnnnnnnnnnnnnnnnnnnnnnnnnnnnnnnnnnnnnnnnnnnnnnnnnnnnnnnnnnnnnnnnnnnnnnnnnnnnnnnnnnnnnnnnnnnnnnnnnnnnnnnnnnnnnnnnnnnnnnnnnnnnnnnnnnnnnnnnnnnnnnnnnnnnnnnnnnnnnnnnnnnnnnnnnnnnnnnnnnnnnnnnnnnnnnnnnnnnnnnnnnnnnnnnnnnnnnnnnnnnnnnnnnnnnnnnnnnnnnnnnnnnnnnnnnnnnnnnnnnnnnnnnnnnnnnnnnnnnnnnnnnnnnnnnnnnnnnnnnnnnnnnnnnnnnnnnnnnnnnnnnnnnnnnnnnnnnnnnnnnnnnnnnnnnnnnnnnnnnnnnnnnnnnnnnnnnnnnnnnnnnnnnnnnnnnnnnnnnnnnnnnnnnnnnnnnnnnnnnnnnnnnnnnnnnnnnnnnnnnnnnnnnnnnnnnnnnnnnnnnnnnnnnnnnnnnnnnnnnnnnnnnnnnnnnnnnnnnnnnnnnnnnnnnnnnnnnnnnnnnnnnnnnnnnnnnnnnnnnnnnnnnnnnnnnnnnnnnnnnnnnnnnnnnnnnnnnnnnnnnnnnnnnnnnnnnnnnnnnnnnnnnnnnnnnnnnnnnnnnnnnnnnnnnnnnnnnnnnnnnnnnnnnnnnnnnnnnnnnnnnnnnnnnnnnnnnnnnnnnnnnnnnnnnnnnnnnnnnnnnnnnnnnnnnnnnnnnnnnnnnnnnnnnnnnnnnnnnnnnnnnnnnnnnnnnnnnnnnnnnnnnnnnnnnnnnnnnnnnnnnnnnnnnnnnnnnnnnnnnnnnnnnnnnnnnnnnnnnnnnnnnnnnnnnnnnnnnnnnnnnnnnnnnnnnnnnnnnnnnnnnnnnnnnnnnnnnnnnnnnnnnnnnnnnnnnnnnnnnnnnnnnnnnnnnnnnnnnnnnnnnnnnnnnnnnnnnnnnnnnnnnnnnnnnnnnnnnnnnnnnnnnnnnnnnnnnnnnnnnnnnnnnnnnnnnnnnnnnnnnnnnnnnnnnnnnnnnnnnnnnnnnnnnnnnnnnnnnnnnnnnnnnnnnnnnnnnnnnnnnnnnnnnnnnnnnnnnnnnnnnnnnnnnnnnnnnnnnnnnnnnnnnnnnnnnnnnnnnnnnnnnnnnnnnnnnnnnnnnnnnnnnnnnnnnnnnnnnnnnnnnnnnnnnnnnnnnnnnnnnnnnnnnnnnnnnnnnnnnnnnnnnnnnnnnnnnnnnnnnnnnnnnnnnnnnnnnnnnnnnnnnnnnnnnnnnnnnnnnnnnnnnnnnnnnnnnnnnnnnnnnnnnnnnnnnnnnnnnnnnnnnnnnnnnnnnnnnnnnnnnnnnnnnnnnnnnnnnnnnnnnnnnnnnnnnnnnnnnnnnnnnnnnnnnnnnnnnnnnnnnnnnnnnnnnnnnnnnnnnnnnnnnnnnnnnnnnnnnnnnnnnnnnnnnnnnnnnnnnnnnnnnnnnnnnnnnnnnnnnnnnnnnnnnnnnnnnnnnnnnnnnnnnnnnnnnnnnnnnnnnnnnnnnnnnnnnnnnnnnnnnnnnnnnnnnnnnnnnnnnnnnnnnnnnnnnnnnnnnnnnnnnnnnnnnnnnnnnnnnnnnnnnnnnnnnnnnnnnnnnnnnnnnnnnnnnnnnnnnnnnnnnnnnnnnnnnnnnnnnnnnnnnnnnnnnnnnnnnnnnnnnnnnnnnnnnnnnnnnnnnnnnnnnnnnnnnnnnnnnnnnnnnnnnnnnnnnnnnnnnnnnnnnnnnnnnnnnnnnnnnnnnnnnnnnnnnnnnnnnnnnnnnnnnnnnnnnnnnnnnnnnnnnnnnnnnnnnnnnnnnnnnnnnnnnnnnnnnnnnnnnnnnnnnnnnnnnnnnnnnnnnnnnnnnnnnnnnnnnnnnnnnnnnnnnnnnnnnnnnnnnnnnnnnnnnnnnnnnnnnnnnnnnnnnnnnnnnnnnnnnnnnnnnnnnnnnnnnnnnnnnnnnnnnnnnnnnnnnnnnnnnnnnnnnnnnnnnnnnnnnnnnnnnnnnnnnnnnnnnnnnnnnnnnnnnnnnnnnnnnnnnnnnnnnnnnnnnnnnnnnnnnnnnnnnnnnnnnnnnnnnnnnnnnnnnnnnnnnnnnnnnnnnnnnnnnnnnnnnnnnnnnnnnnnnnnnnnnnnnnnnnnnnnnnnnnnnnnnnnnnnnnnnnnnnnnnnnnnnnnnnnnnnnnnnnnnnnnnnnnnnnnnnnnnnnnnnnnnnnnnnnnnnnnnnnnnnnnnnnnnnnnnnnnnnnnnnnnnnnnnnnnnnnnnnnnnnnnnnnnnnnnnnnnnnnnnnnnnnnnnnnnnnnnnnnnnnnnnnnnnnnnnnnnnnnnnnnnnnnnnnnnnnnnnnnnnnnnnnnnnnnnnnnnnnnnnnnnnnnnnnnnnnnnnnnnnnnnnnnnnnnnnnnnnnnnnnnnnnnnnnnnnnnnnnnnnnnnnnnnnnnnnnnnnnnnnnnnnnnnnnnnnnnnnnnnnnnnnnnnnnnnnnnnnnnnnnnnnnnnnnnnnnnnnnnnnnnnnnnnnnnnnnnnnnnnnnnnnnnnnnnnnnnnnnnnnnnnnnnnnnnnnnnnnnnnnnnnnnnnnnnnnnnnnnnnnnnnnnnnnnnnnnnnnnnnnnnnnnnnnnnnnnnnnnnnnnnnnnnnnnnnnnnnnnnnnnnnnnnnnnnnnnnnnnnnnnnnnnnnnnnnnnnnnnnnnnnnnnnnnnnnnnnnnnnnnnnnnnnnnnnnnnnnnnnnnnnnnnnnnnnnnnnnnnnnnnnnnnnnnnnnnnnnnnnnnnnnnnnnnnnnnnnnnnnnnnnnnnnnnnnnnnnnnnnnnnnnnnnnnnnnnnnnnnnnnnnnnnnnnnnnnnnnnnnnnnnnnnnnnnnnnnnnnnnnnnnnnnnnnnnnnnnnnnnnnnnnnnnnnnnnnnnnnnnnnnnnnnnnnnnnnnnnnnnnnnnnnnnnnnnnnnnnnnnnnnnnnnnnnnnnnnnnnnnnnnnnnnnnnnnnnnnnnnnnnnnnnnnnnnnnnnnnnnnnnnnnnnnnnnnnnnnnnnnnnnnnnnnnnnnnnnnnnnnnnnnnnnnnnnnnnnnnnnnnnnnnnnnnnnnnnnnnnnnnnnnnnnnnnnnnnnnnnnnnnnnnnnnnnnnnnnnnnnnnnnnnnnnnnnnnnnnnnnnnnnnnnnnnnnnnnnnnnnnnnnnnnnnnnnnnnnnnnnnnnnnnnnnnnnnnnnnnnnnnnnnnnnnnnnnnnnnnnnnnnnnnnnnnnnnnnnnnnnnnnnnnnnnnnnnnnnnnnnnnnnnnnnnnnnnnnnnnnnnnnnnnnnnnnnnnnnnnnnnnnnnnnnnnnnnnnnnnnnnnnnnnnnnnnnnnnnnnnnnnnnnnnnnnnnnnnnnnnnnnnnnnnnnnnnnnnnnnnnnnnnnnnnnnnnnnnnnnnnnnnnnnnnnnnnnnnnnnnnnnnnnnnnnnnnnnnnnnnnnnnnnnnnnnnnnnnnnnnnnnnnnnnnnnnnnnnnnnnnnnnnnnnnnnnnnnnnnnnnnnnnnnnnnnnnnnnnnnnnnnnnnnnnnnnnnnnnnnnnnnnnnnnnnnnnnnnnnnnnnnnnnnnnnnnnnnnnnnnnnnnnnnnnnnnnnnnnnnnnnnnnnnnnnnnnnnnnnnnnnnnnnnnnnnnnnnnnnnnnnnnnnnnnnnnnnnnnnnnnnnnnnnnnnnnnnnnnnnnnnnnnnnnnnnnnnnnnnnnnnnnnnnnnnnnnnnnnnnnnnnnnnnnnnnnnnnnnnnnnnnnnnnnnnnnnnnnnnnnnnnnnnnnnnnnnnnnnnnnnnnnnnnnnnnnnnnnnnnnnnnnnnnnnnnnnnnnnnnnnnnnnnnnnnnnnnnnnnnnnnnnnnnnnnnnnnnnnnnnnnnnnnnnnnnnnnnnnnnnnnnnnnnnnnnnnnnnnnnnnnnnnnnnnnnnnnnnnnnnnnnnnnnnnnnnnnnnnnnnnnnnnnnnnnnnnnnnnnnnnnnnnnnnnnnnnnnnnnnnnnnnnnnnnnnnnnnnnnnnnnnnnnnnnnnnnnnnnnnnnnnnnnnnnnnnnnnnnnnnnnnnnnnnnnnnnnnnnnnnnnnnnnnnnnnnnnnnnnnnnnnnnnnnnnnnnnnnnnnnnnnnnnnnnnnnnnnnnnnnnnnnnnnnnnnnnnnnnnnnnnnnnnnnnnnnnnnnnnnnnnnnnnnnnnnnnnnnnnnnnnnnnnnnnnnnnnnnnnnnnnnnnnnnnnnnnnnnnnnnnnnnnnnnnnnnnnnnnnnnnnnnnnnnnnnnnnnnnnnnnnnnnnnnnnnnnnnnnnnnnnnnnnnnnnnnnnnnnnnnnnnnnnnnnnnnnnnnnnnnnnnnnnnnnnnnnnnnnnnnnnnnnnnnnnnnnnnnnnnnnnnnnnnnnnnnnnnnnnnnnnnnnnnnnnnnnnnnnnnnnnnnnnnnnnnnnnnnnnnnnnnnnnnnnnnnnnnnnnnnnnnnnnnnnnnnnnnnnnnnnnnnnnnnnnnnnnnnnnnnnnnnnnnnnnnnnnnnnnnnnnnnnnnnnnnnnnnnnnnnnnnnnnnnnnnnnnnnnnnnnnnnnnnnnnnnnnnnnnnnnnnnnnnnnnnnnnnnnnnnnnnnnnnnnnnnnnnnnnnnnnnnnnnnnnnnnnnnnnnnnnnnnnnnnnnnnnnnnnnnnnnnnnnnnnnnnnnnnnnnnnnnnnnnnnnnnnnnnnnnnnnnnnnnnnnnnnnnnnnnnnnnnnnnnnnnnnnnnnnnnnnnnnnnnnnnnnnnnnnnnnnnnnnnnnnnnnnnnnnnnnnnnnnnnnnnnnnnnnnnnnnnnnnnnnnnnnnnnnnnnnnnnnnnnnnnnnnnnnnnnnnnnnnnnnnnnnnnnnnnnnnnnnnnnnnnnnnnnnnnnnnnnnnnnnnnnnnnnnnnnnnnnnnnnnnnnnnnnnnnnnnnnnnnnnnnnnnnnnnnnnnnnnnnnnnnnnnnnnnnnnnnnnnnnnnnnnnnnnnnnnnnnnnnnnnnnnnnnnnnnnnnnnnnnnnnnnnnnnnnnnnnnnnnnnnnnnnnnnnnnnnnnnnnnnnnnnnnnnnnnnnnnnnnnnnnnnnnnnnnnnnnnnnnnnnnnnnnnnnnnnnnnnnnnnnnnnnnnnnnnnnnnnnnnnnnnnnnnnnnnnnnnnnnnnnnnnnnnnnnnnnnnnnnnnnnnnnnnnnnnnnnnnnnnnnnnnnnnnnnnnnnnnnnnnnnnnnnnnnnnnnnnnnnnnnnnnnnnnnnnnnnnnnnnnnnnnnnnnnnnnnnnnnnnnnnnnnnnnnnnnnnnnnnnnnnnnnnnnnnnnnnnnnnnnnnnnnnnnnnnnnnnnnnnnnnnnnnnnnnnnnnnnnnnnnnnnnnnnnnnnnnnnnnnnnnnnnnnnnnnnnnnnnnnnnnnnnnnnnnnnnnnnnnnnnnnnnnnnnnnnnnnnnnnnnnnnnnnnnnnnnnnnnnnnnnnnnnnnnnnnnnnnnnnnnnnnnnnnnnnnnnnnnnnnnnnnnnnnnnnnnnnnnnnnnnnnnnnnnnnnnnnnnnnnnnnnnnnnnnnnnnnnnnnnnnnnnnnnnnnnnnnnnnnnnnnnnnnnnnnnnnnnnnnnnnnnnnnnnnnnnnnnnnnnnnnnnnnnnnnnnnnnnnnnnnnnnnnnnnnnnnnnnnnnnnnnnnnnnnnnnnnnnnnnnnnnnnnnnnnnnnnnnnnnnnnnnnnnnnnnnnnnnnnnnnnnnnnnnnnnnnnnnnnnnnnnnnnnnnnnnnnnnnnnnnnnnnnnnnnnnnnnnnnnnnnnnnnnnnnnnnnnnnnnnnnnnnnnnnnnnnnnnnnnnnnnnnnnnnnnnnnnnnnnnnnnnnnnnnnnnnnnnnnnnnnnnnnnnnnnnnnnnnnnnnnnnnnnnnnnnnnnnnnnnnnnnnnnnnnnnnnnnnnnnnnnnnnnnnnnnnnnnnnnnnnnnnnnnnnnnnnnnnnnnnnnnnnnnnnnnnnnnnnnnnnnnnnnnnnnnnnnnnnnnnnnnnnnnnnnnnnnnnnnnnnnnnnnnnnnnnnnnnnnnnnnnnnnnnnnnnnnnnnnnnnnnnnnnnnnnnnnnnnnnnnnnnnnnnnnnnnnnnnnnnnnnnnnnnnnnnnnnnnnnnnnnnnnnnnnnnnnnnnnnnnnnnnnnnnnnnnnnnnnnnnnnnnnnnnnnnnnnnnnnnnnnnnnnnnnnnnnnnnnnnnnnnnnnnnnnnnnnnnnnnnnnnnnnnnnnnnnnnnnnnnnnnnnnnnnnnnnnnnnnnnnnnnnnnnnnnnnnnnnnnnnnnnnnnnnnnnnnnnnnnnnnnnnnnnnnnnnnnnnnnnnnnnnnnnnnnnnnnnnnnnnnnnnnnnnnnnnnnnnnnnnnnnnnnnnnnnnnnnnnnnnnnnnnnnnnnnnnnnnnnnnnnnnnnnnnnnnnnnnnnnnnnnnnnnnnnnnnnnnnnnnnnnnnnnnnnnnnnnnnnnnnnnnnnnnnnnnnnnnnnnnnnnnnnnnnnnnnnnnnnnnnnnnnnnnnnnnnnnnnnnnnnnnnnnnnnnnnnnnnnnnnnnnnnnnnnnnnnnnnnnnnnnnnnnnnnnnnnnnnnnnnnnnnnnnnnnnnnnnnnnnnnnnnnnnnnnnnnnnnnnnnnnnnnnnnnnnnnnnnnnnnnnnnnnnnnnnnnnnnnnnnnnnnnnnnnnnnnnnnnnnnnnnnnnnnnnnnnnnnnnnnnnnnnnnnnnnnnnnnnnnnnnnnnnnnnnnnnnnnnnnnnnnnnnnnnnnnnnnnnnnnnnnnnnnnnnnnnnnnnnnnnnnnnnnnnnnnnnnnnnnnnnnnnnnnnnnnnnnnnnnnnnnnnnnnnnnnnnnnnnnnnnnnnnnnnnnnnnnnnnnnnnnnnnnnnnnnnnnnnnnnnnnnnnnnnnnnnnnnnnnnnnnnnnnnnnnnnnnnnnnnnnnnnnnnnnnnnnnnnnnnnnnnnnnnnnnnnnnnnnnnnnnnnnnnnnnnnnnnnnnnnnnnnnnnnnnnnnnnnnnnnnnnnnnnnnnnnnnnnnnnnnnnnnnnnnnnnnnnnnnnnnnnnnnnnnnnnnnnnnnnnnnnnnnnnnnnnnnnnnnnnnnnnnnnnnnnnnnnnnnnnnnnnnnnnnnnnnnnnnnnnnnnnnnnnnnnnnnnnnnnnnnnnnnnnnnnnnnnnnnnnnnnnnnnnnnnnnnnnnnnnnnnnnnnnnnnnnnnnnnnnnnnnnnnnnnnnnnnnnnnnnnnnnnnnnnnnnnnnnnnnnnnnnnnnnnnnnnnnnnnnnnnnnnnnnnnnnnnnnnnnnnnnnnnnnnnnnnnnnnnnnnnnnnnnnnnnnnnnnnnnnnnnnnnnnnnnnnnnnnnnnnnnnnnnnnnnnnnnnnnnnnnnnnnnnnnnnnnnnnnnnnnnnnnnnnnnnnnnnnnnnnnnnnnnnnnnnnnnnnnnnnnnnnnnnnnnnnnnnnnnnnnnnnnnnnnnnnnnnnnnnnnnnnnnnnnnnnnnnnnnnnnnnnnnnnnnnnnnnnnnnnnnnnnnnnnnnnnnnnnnnnnnnnnnnnnnnnnnnnnnnnnnnnnnnnnnnnnnnnnnnnnnnnnnnnnnnnnnnnnnnnnnnnnnnnnnnnnnnnnnnnnnnnnnnnnnnnnnnnnnnnnnnnnnnnnnnnnnnnnnnnnnnnnnnnnnnnnnnnnnnnnnnnnnnnnnnnnnnnnnnnnnnnnnnnnnnnnnnnnnnnnnnnnnnnnnnnnnnnnnnnnnnnnnnnnnnnnnnnnnnnnnnnnnnnnnnnnnnnnnnnnnnnnnnnnnnnnnnnnnnnnnnnnnnnnnnnnnnnnnnnnnnnnnnnnnnnnnnnnnnnnnnnnnnnnnnnnnnnnnnnnnnnnnnnnnnnnnnnnnnnnnnnnnnnnnnnnnnnnnnnnnnnnnnnnnnnnnnnnnnnnnnnnnnnnnnnnnnnnnnnnnnnnnnnnnnnnnnnnnnnnnnnnnnnnnnnnnnnnnnnnnnnnnnnnnnnnnnnnnnnnnnnnnnnnnnnnnnnnnnnnnnnnnnnnnnnnnnnnnnnnnnnnnnnnnnnnnnnnnnnnnnnnnnnnnnnnnnnnnnnnnnnnnnnnnnnnnnnnnnnnnnnnnnnnnnnnnnnnnnnnnnnnnnnnnnnnnnnnnnnnnnnnnnnnnnnnnnnnnnnnnnnnnnnnnnnnnnnnnnnnnnnnnnnnnnnnnnnnnnnnnnnnnnnnnnnnnnnnnnnnnnnnnnnnnnnnnnnnnnnnnnnnnnnnnnnnnnnnnnnnnnnnnnnnnnnnnnnnnnnnnnnnnnnnnnnnnnnnnnnnnnnnnnnnnnnnnnnnnnnnnnnnnnnnnnnnnnnnnnnnnnnnnnnnnnnnnnnnnnnnnnnnnnnnnnnnnnnnnnnnnnnnnnnnnnnnnnnnnnnnnnnnnnnnnnnnnnnnnnnnnnnnnnnnnnnnnnnnnnnnnnnnnnnnnnnnnnnnnnnnnnnnnnnnnnnnnnnnnnnnnnnnnnnnnnnnnnnnnnnnnnnnnnnnnnnnnnnnnnnnnnnnnnnnnnnnnnnnnnnnnnnnnnnnnnnnnnnnnnnnnnnnnnnnnnnnnnnnnnnnnnnnnnnnnnnnnnnnnnnnnnnnnnnnnnnnnnnnnnnnnnnnnnnnnnnnnnnnnnnnnnnnnnnnnnnnnnnnnnnnnnnnnnnnnnnnnnnnnnnnnnnnnnnnnnnnnnnnnnnnnnnnnnnnnnnnnnnnnnnnnnnnnnnnnnnnnnnnnnnnnnnnnnnnnnnnnnnnnnnnnnnnnnnnnnnnnnnnnnnnnnnnnnnnnnnnnnnnnnnnnnnnnnnnnnnnnnnnnnnnnnnnnnnnnnnnnnnnnnnnnnnnnnnnnnnnnnnnnnnnnnnnnnnnnnnnnnnnnnnnnnnnnnnnnnnnnnnnnnnnnnnnnnnnnnnnnnnnnnnnnnnnnnnnnnnnnnnnnnnnnnnnnnnnnnnnnnnnnnnnnnnnnnnnnnnnnnnnnnnnnnnnnnnnnnnnnnnnnnnnnnnnnnnnnnnnnnnnnnnnnnnnnnnnnnnnnnnnnnnnnnnnnnnnnnnnnnnnnnnnnnnnnnnnnnnnnnnnnnnnnnnnnnnnnnnnnnnnnnnnnnnnnnnnnnnnnnnnnnnnnnnnnnnnnnnnnnnnnnnnnnnnnnnnnnnnnnnnnnnnnnnnnnnnnnnnnnnnnnnnnnnnnnnnnnnnnnnnnnnnnnnnnnnnnnnnnnnnnnnnnnnnnnnnnnnnnnnnnnnnnnnnnnnnnnnnnnnnnnnnnnnnnnnnnnnnnnnnnnnnnnnnnnnnnnnnnnnnnnnnnnnnnnnnnnnnnnnnnnnnnnnnnnnnnnnnnnnnnnnnnnnnnnnnnnnnnnnnnnnnnnnnnnnnnnnnnnnnnnnnnnnnnnnnnnnnnnnnnnnnnnnnnnnnnnnnnnnnnnnnnnnnnnnnnnnnnnnnnnnnnnnnnnnnnnnnnnnnnnnnnnnnnnnnnnnnnnnnnnnnnnnnnnnnnnnnnnnnnnnnnnnnnnnnnnnnnnnnnnnnnnnnnnnnnnnnnnnnnnnnnnnnnnnnnnnnnnnnnnnnnnnnnnnnnnnnnnnnnnnnnnnnnnnnnnnnnnnnnnnnnnnnnnnnnnnnnnnnnnnnnnnnnnnnnnnnnnnnnnnnnnnnnnnnnnnnnnnnnnnnnnnnnnnnnnnnnnnnnnnnnnnnnnnnnnnnnnnnnnnnnnnnnnnnnnnnnnnnnnnnnnnnnnnnnnnnnnnnnnnnnnnnnnnnnnnnnnnnnnnnnnnnnnnnnnnnnnnnnnnnnnnnnnnnnnnnnnnnnnnnnnnnnnnnnnnnnnnnnnnnnnnnnnnnnnnnnnnnnnnnnnnnnnnnnnnnnnnnnnnnnnnnnnnnnnnnnnnnnnnnnnnnnnnnnnnnnnnnnnnnnnnnnnnnnnnnnnnnnnnnnnnnnnnnnnnnnnnnnnnnnnnnnnnnnnnnnnnnnnnnnnnnnnnnnnnnnnnnnnnnnnnnnnnnnnnnnnnnnnnnnnnnnnnnnnnnnnnnnnnnnnnnnnnnnnnnnnnnnnnnnnnnnnnnnnnnnnnnnnnnnnnnnnnnnnnnnnnnnnnnnnnnnnnnnnnnnnnnnnnnnnnnnnnnnnnnnnnnnnnnnnnnnnnnnnnnnnnnnnnnnnnnnnnnnnnnnnnnnnnnnnnnnnnnnnnnnnnnnnnnnnnnnnnnnnnnnnnnnnnnnnnnnnnnnnnnnnnnnnnnnnnnnnnnnnnnnnnnnnnnnnnnnnnnnnnnnnnnnnnnnnnnnnnnnnnnnnnnnnnnnnnnnnnnnnnnnnnnnnnnnnnnnnnnnnnnnnnnnnnnnnnnnnnnnnnnnnnnnnnnnnnnnnnnnnnnnnnnnnnnnnnnnnnnnnnnnnnnnnnnnnnnnnnnnnnnnnnnnnnnnnnnnnnnnnnnnnnnnnnnnnnnnnnnnnnnnnnnnnnnnnnnnnnnnnnnnnnnnnnnnnnnnnnnnnnnnnnnnnnnnnnnnnnnnnnnnnnnnnnnnnnnnnnnnnnnnnnnnnnnnnnnnnnnnnnnnnnnnnnnnnnnnnnnnnnnnnnnnnnnnnnnnnnnnnnnnnnnnnnnnnnnnnnnnnnnnnnnnnnnnnnnnnnnnnnnnnnnnnnnnnnnnnnnnnnnnnnnnnnnnnnnnnnnnnnnnnnnnnnnnnnnnnnnnnnnnnnnnnnnnnnnnnnnnnnnnnnnnnnnnnnnnnnnnnnnnnnnnnnnnnnnnnnnnnnnnnnnnnnnnnnnnnnnnnnnnnnnnnnnnnnnnnnnnnnnnnnnnnnnnnnnnnnnnnnnnnnnnnnnnnnnnnnnnnnnnnnnnnnnnnnnnnnnnnnnnnnnnnnnnnnnnnnnnnnnnnnnnnnnnnnnnnnnnnnnnnnnnnnnnnnnnnnnnnnnnnnnnnnnnnnnnnnnnnnnnnnnnnnnnnnnnnnnnnnnnnnnnnnnnnnnnnnnnnnnnnnnnnnnnnnnnnnnnnnnnnnnnnnnnnnnnnnnnnnnnnnnnnnnnnnnnnnnnnnnnnnnnnnnnnnnnnnnnnnnnnnnnnnnnnnnnnnnnnnnnnnnnnnnnnnnnnnnnnnnnnnnnnnnnnnnnnnnnnnnnnnnnnnnnnnnnnnnnnnnnnnnnnnnnnnnnnnnnnnnnnnnnnnnnnnnnnnnnnnnnnnnnnnnnnnnnnnnnnnnnnnnnnnnnnnnnnnnnnnnnnnnnnnnnnnnnnnnnnnnnnnnnnnnnnnnnnnnnnnnnnnnnnnnnnnnnnnnnnnnnnnnnnnnnnnnnnnnnnnnnnnnnnnnnnnnnnnnnnnnnnnnnnnnnnnnnnnnnnnnnnnnnnnnnnnnnnnnnnnnnnnnnnnnnnnnnnnnnnnnnnnnnnnnnnnnnnnnnnnnnnnnnnnnnnnnnnnnnnnnnnnnnnnnnnnnnnnnnnnnnnnnnnnnnnnnnnnnnnnnnnnnnnnnnnnnnnnnnnnnnnnnnnnnnnnnnnnnnnnnnnnnnnnnnnnnnnnnnnnnnnnnnnnnnnnnnnnnnnnnnnnnnnnnnnnnnnnnnnnnnnnnnnnnnnnnnnnnnnnnnnnnnnnnnnnnnnnnnnnnnnnnnnnnnnnnnnnnnnnnnnnnnnnnnnnnnnnnnnnnnnnnnnnnnnnnnnnnnnnnnnnnnnnnnnnnnnnnnnnnnnnnnnnnnnnnnnnnnnnnnnnnnnnnnnnnnnnnnnnnnnnnnnnnnnnnnnnnnnnnnnnnnnnnnnnnnnnnnnnnnnnnnnnnnnnnnnnnnnnnnnnnnnnnnnnnnnnnnnnnnnnnnnnnnnnnnnnnnnnnnnnnnnnnnnnnnnnnnnnnnnnnnnnnnnnnnnnnnnnnnnnnnnnnnnnnnnnnnnnnnnnnnnnnnnnnnnnnnnnnnnnnnnnnnnnnnnnnnnnnnnnnnnnnnnnnnnnnnnnnnnnnnnnnnnnnnnnnnnnnnnnnnnnnnnnnnnnnnnnnnnnnnnnnnnnnnnnnnnnnnnnnnnnnnnnnnnnnnnnnnnnnnnnnnnnnnnnnnnnnnnnnnnnnnnnnnnnnnnnnnnnnnnnnnnnnnnnnnnnnnnnnnnnnnnnnnnnnnnnnnnnnnnnnnnnnnnnnnnnnnnnnnnnnnnnnnnnnnnnnnnnnnnnnnnnnnnnnnnnnnnnnnnnnnnnnnnnnnnnnnnnnnnnnnnnnnnnnnnnnnnnnnnnnnnnnnnnnnnnnnnnnnnnnnnnnnnnnnnnnnnnnnnnnnnnnnnnnnnnnnnnnnnnnnnnnnnnnnnnnnnnnnnnnnnnnnnnnnnnnnnnnnnnnnnnnnnnnnnnnnnnnnnnnnnnnnnnnnnnnnnnnnnnnnnnnnnnnnnnnnnnnnnnnnnnnnnnnnnnnnnnnnnnnnnnnnnnnnnnnnnnnnnnnnnnnnnnnnnnnnnnnnnnnnnnnnnnnnnnnnnnnnnnnnnnnnnnnnnnnnnnnnnnnnnnnnnnnnnnnnnnnnnnnnnnnnnnnnnnnnnnnnnnnnnnnnnnnnnnnnnnnnnnnnnnnnnnnnnnnnnnnnnnnnnnnnnnnnnnnnnnnnnnnnnnnnnnnnnnnnnnnnnnnnnnnnnnnnnnnnnnnnnnnnnnnnnnnnnnnnnnnnnnnnnnnnnnnnnnnnnnnnnnnnnnnnnnnnnnnnnnnnnnnnnnnnnnnnnnnnnnnnnnnnnnnnnnnnnnnnnnnnnnnnnnnnnnnnnnnnnnnnnnnnnnnnnnnnnnnnnnnnnnnnnnnnnnnnnnnnnnnnnnnnnnnnnnnnnnnnnnnnnnnnnnnnnnnnnnnnnnnnnnnnnnnnnnnnnnnnnnnnnnnnnnnnnnnnnnnnnnnnnnnnnnnnnnnnnnnnnnnnnnnnnnnnnnnnnnnnnnnnnnnnnnnnnnnnnnnnnnnnnnnnnnnnnnnnnnnnnnnnnnnnnnnnnnnnnnnnnnnnnnnnnnnnnnnnnnnnnnnnnnnnnnnnnnnnnnnnnnnnnnnnnnnnnnnnnnnnnnnnnnnnnnnnnnnnnnnnnnnnnnnnnnnnnnnnnnnnnnnnnnnnnnnnnnnnnnnnnnnnnnnnnnnnnnnnnnnnnnnnnnnnnnnnnnnnnnnnnnnnnnnnnnnnnnnnnnnnnnnnnnnnnnnnnnnnnnnnnnnnnnnnnnnnnnnnnnnnnnnnnnnnnnnnnnnnnnnnnnnnnnnnnnnnnnnnnnnnnnnnnnnnnnnnnnnnnnnnnnnnnnnnnnnnnnnnnnnnnnnnnnnnnnnnnnnnnnnnnnnnnnnnnnnnnnnnnnnnnnnnnnnnnnnnnnnnnnnnnnnnnnnnnnnnnnnnnnnnnnnnnnnnnnnnnnnnnnnnnnnnnnnnnnnnnnnnnnnnnnnnnnnnnnnnnnnnnnnnnnnnnnnnnnnnnnnnnnnnnnnnnnnnnnnnnnnnnnnnnnnnnnnnnnnnnnnnnnnnnnnnnnnnnnnnnnnnnnnnnnnnnnnnnnnnnnnnnnnnnnnnnnnnnnnnnnnnnnnnnnnnnnnnnnnnnnnnnnnnnnnnnnnnnnnnnnnnnnnnnnnnnnnnnnnnnnnnnnnnnnnnnnnnnnnnnnnnnnnnnnnnnnnnnnnnnnnnnnnnnnnnnnnnnnnnnnnnnnnnnnnnnnnnnnnnnnnnnnnnnnnnnnnnnnnnnnnnnnnnnnnnnnnnnnnnnnnnnnnnnnnnnnnnnnnnnnnnnnnnnnnnnnnnnnnnnnnnnnnnnnnnnnnnnnnnnnnnnnnnnnnnnnnnnnnnnnnnnnnnnnnnnnnnnnnnnnnnnnnnnnnnnnnnnnnnnnnnnnnnnnnnnnnnnnnnnnnnnnnnnnnnnnnnnnnnnnnnnnnnnnnnnnnnnnnnnnnnnnnnnnnnnnnnnnnnnnnnnnnnnnnnnnnnnnnnnnnnnnnnnnnnnnnnnnnnnnnnnnnnnnnnnnnnnnnnnnnnnnnnnnnnnnnnnnnnnnnnnnnnnnnnnnnnnnnnnnnnnnnnnnnnnnnnnnnnnnnnnnnnnnnnnnnnnnnnnnnnnnnnnnnnnnnnnnnnnnnnnnnnnnnnnnnnnnnnnnnnnnnnnnnnnnnnnnnnnnnnnnnnnnnnnnnnnnnnnnnnnnnnnnnnnnnnnnnnnnnnnnnnnnnnnnnnnnnnnnnnnnnnnnnnnnnnnnnnnnnnnnnnnnnnnnnnnnnnnnnnnnnnnnnnnnnnnnnnnnnnnnnnnnnnnnnnnnnnnnnnnnnnnnnnnnnnnnnnnnnnnnnnnnnnnnnnnnnnnnnnnnnnnnnnnnnnnnnnnnnnnnnnnnnnnnnnnnnnnnnnnnnnnnnnnnnnnnnnnnnnnnnnnnnnnnnnnnnnnnnnnnnnnnnnnnnnnnnnnnnnnnnnnnnnnnnnnnnnnnnnnnnnnnnnnnnnnnnnnnnnnnnnnnnnnnnnnnnnnnnnnnnnnnnnnnnnnnnnnnnnnnnnnnnnnnnnnnnnnnnnnnnnnnnnnnnnnnnnnnnnnnnnnnnnnnnnnnnnnnnnnnnnnnnnnnnnnnnnnnnnnnnnnnnnnnnnnnnnnnnnnnnnnnnnnnnnnnnnnnnnnnnnnnnnnnnnnnnnnnnnnnnnnnnnnnnnnnnnnnnnnnnnnnnnnnnnnnnnnnnnnnnnnnnnnnnnnnnnnnnnnnnnnnnnnnnnnnnnnnnnnnnnnnnnnnnnnnnnnnnnnnnnnnnnnnnnnnnnnnnnnnnnnnnnnnnnnnnnnnnnnnnnnnnnnnnnnnnnnnnnnnnnnnnnnnnnnnnnnnnnnnnnnnnnnnnnnnnnnnnnnnnnnnnnnnnnnnnnnnnnnnnnnnnnnnnnnnnnnnnnnnnnnnnnnnnnnnnnnnnnnnnnnnnnnnnnnnnnnnnnnnnnnnnnnnnnnnnnnnnnnnnnnnnnnnnnnnnnnnnnnnnnnnnnnnnnnnnnnnnnnnnnnnnnnnnnnnnnnnnnnnnnnnnnnnnnnnnnnnnnnnnnnnnnnnnnnnnnnnnnnnnnnnnnnnnnnnnnnnnnnnnnnnnnnnnnnnnnnnnnnnnnnnnnnnnnnnnnnnnnnnnnnnnnnnnnnnnnnnnnnnnnnnnnnnnnnnnnnnnnnnnnnnnnnnnnnnnnnnnnnnnnnnnnnnnnnnnnnnnnnnnnnnnnnnnnnnnnnnnnnnnnnnnnnnnnnnnnnnnnnnnnnnnnnnnnnnnnnnnnnnnnnnnnnnnnnnnnnnnnnnnnnnnnnnnnnnnnnnnnnnnnnnnnnnnnnnnnnnnnnnnnnnnnnnnnnnnnnnnnnnnnnnnnnnnnnnnnnnnnnnnnnnnnnnnnnnnnnnnnnnnnnnnnnnnnnnnnnnnnnnnnnnnnnnnnnnnnnnnnnnnnnnnnnnnnnnnnnnnnnnnnnnnnnnnnnnnnnnnnnnnnnnnnnnnnnnnnnnnnnnnnnnnnnnnnnnnnnnnnnnnnnnnnnnnnnnnnnnnnnnnnnnnnnnnnnnnnnnnnnnnnnnnnnnnnnnnnnnnnnnnnnnnnnnnnnnnnnnnnnnnnnnnnnnnnnnnnnnnnnnnnnnnnnnnnnnnnnnnnnnnnnnnnnnnnnnnnnnnnnnnnnnnnnnnnnnnnnnnnnnnnnnnnnnnnnnnnnnnnnnnnnnnnnnnnnnnnnnnnnnnnnnnnnnnnnnnnnnnnnnnnnnnnnnnnnnnnnnnnnnnnnnnnnnnnnnnnnnnnnnnnnnnnnnnnnnnnnnnnnnnnnnnnnnnnnnnnnnnnnnnnnnnnnnnnnnnnnnnnnnnnnnnnnnnnnnnnnnnnnnnnnnnnnnnnnnnnnnnnnnnnnnnnnnnnnnnnnnnnnnnnnnnnnnnnnnnnnnnnnnnnnnnnnnnnnnnnnnnnnnnnnnnnnnnnnnnnnnnnnnnnnnnnnnnnnnnnnnnnnnnnnnnnnnnnnnnnnnnnnnnnnnnnnnnnnnnnnnnnnnnnnnnnnnnnnnnnnnnnnnnnnnnnnnnnnnnnnnnnnnnnnnnnnnnnnnnnnnnnnnnnnnnnnnnnnnnnnnnnnnnnnnnnnnnnnnnnnnnnnnnnnnnnnnnnnnnnnnnnnnnnnnnnnnnnnnnnnnnnnnnnnnnnnnnnnnnnnnnnnnnnnnnnnnnnnnnnnnnnnnnnnnnnnnnnnnnnnnnnnnnnnnnnnnnnnnnnnnnnnnnnnnnnnnnnnnnnnnnnnnnnnnnnnnnnnnnnnnnnnnnnnnnnnnnnnnnnnnnnnnnnnnnnnnnnnnnnnnnnnnnnnnnnnnnnnnnnnnnnnnnnnnnnnnnnnnnnnnnnnnnnnnnnnnnnnnnnnnnnnnnnnnnnnnnnnnnnnnnnnnnnnnnnnnnnnnnnnnnnnnnnnnnnnnnnnnnnnnnnnnnnnnnnnnnnnnnnnnnnnnnnnnnnnnnnnnnnnnnnnnnnnnnnnnnnnnnnnnnnnnnnnnnnnnnnnnnnnnnnnnnnnnnnnnnnnnnnnnnnnnnnnnnnnnnnnnnnnnnnnnnnnnnnnnnnnnnnnnnnnnnnnnnnnnnnnnnnnnnnnnnnnnnnnnnnnnnnnnnnnnnnnnnnnnnnnnnnnnnnnnnnnnnnnnnnnnnnnnnnnnnnnnnnnnnnnnnnnnnnnnnnnnnnnnnnnnnnnnnnnnnnnnnnnnnnnnnnnnnnnnnnnnnnnnnnnnnnnnnnnnnnnnnnnnnnnnnnnnnnnnnnnnnnnnnnnnnnnnnnnnnnnnnnnnnnnnnnnnnnnnnnnnnnnnnnnnnnnnnnnnnnnnnnnnnnnnnnnnnnnnnnnnnnnnnnnnnnnnnnnnnnnnnnnnnnnnnnnnnnnnnnnnnnnnnnnnnnnnnnnnnnnnnnnnnnnnnnnnnnnnnnnnnnnnnnnnnnnnnnnnnnnnnnnnnnnnnnnnnnnnnnnnnnnnnnnnnnnnnnnnnnnnnnnnnnnnnnnnnnnnnnnnnnnnnnnnnnnnnnnnnnnnnnnnnnnnnnnnnnnnnnnnnnnnnnnnnnnnnnnnnnnnnnnnnnnnnnnnnnnnnnnnnnnnnnnnnnnnnnnnnnnnnnnnnnnnnnnnnnnnnnnnnnnnnnnnnnnnnnnnnnnnnnnnnnnnnnnnnnnnnnnnnnnnnnnnnnnnnnnnnnnnnnnnnnnnnnnnnnnnnnnnnnnnnnnnnnnnnnnnnnnnnnnnnnnnnnnnnnnnnnnnnnnnnnnnnnnnnnnnnnnnnnnnnnnnnnnnnnnnnnnnnnnnnnnnnnnnnnnnnnnnnnnnnnnnnnnnnnnnnnnnnnnnnnnnnnnnnnnnnnnnnnnnnnnnnnnnnnnnnnnnnnnnnnnnnnnnnnnnnnnnnnnnnnnnnnnnnnnnnnnnnnnnnnnnnnnnnnnnnnnnnnnnnnnnnnnnnnnnnnnnnnnnnnnnnnnnnnnnnnnnnnnnnnnnnnnnnnnnnnnnnnnnnnnnnnnnnnnnnnnnnnnnnnnnnnnnnnnnnnnnnnnnnnnnnnnnnnnnnnnnnnnnnnnnnnnnnnnnnnnnnnnnnnnnnnnnnnnnnnnnnnnnnnnnnnnnnnnnnnnnnnnnnnnnnnnnnnnnnnnnnnnnnnnnnnnnnnnnnnnnnnnnnnnnnnnnnnnnnnnnnnnnnnnnnnnnnnnnnnnnnnnnnnnnnnnnnnnnnnnnnnnnnnnnnnnnnnnnnnnnnnnnnnnnnnnnnnnnnnnnnnnnnnnnnnnnnnnnnnnnnnnnnnnnnnnnnnnnnnnnnnnnnnnnnnnnnnnnnnnnnnnnnnnnnnnnnnnnnnnnnnnnnnnnnnnnnnnnnnnnnnnnnnnnnnnnnnnnnnnnnnnnnnnnnnnnnnnnnnnnnnnnnnnnnnnnnnnnnnnnnnnnnnnnnnnnnnnnnnnnnnnnnnnnnnnnnnnnnnnnnnnnnnnnnnnnnnnnnnnnnnnnnnnnnnnnnnnnnnnnnnnnnnnnnnnnnnnnnnnnnnnnnnnnnnnnnnnnnnnnnnnnnnnnnnnnnnnnnnnnnnnnnnnnnnnnnnnnnnnnnnnnnnnnnnnnnnnnnnnnnnnnnnnnnnnnnnnnnnnnnnnnnnnnnnnnnnnnnnnnnnnnnnnnnnnnnnnnnnnnnnnnnnnnnnnnnnnnnnnnnnnnnnnnnnnnnnnnnnnnnnnnnnnnnnnnnnnnnnnnnnnnnnnnnnnnnnnnnnnnnnnnnnnnnnnnnnnnnnnnnnnnnnnnnnnnnnnnnnnnnnnnnnnnnnnnnnnnnnnnnnnnnnnnnnnnnnnnnnnnnnnnnnnnnnnnnnnnnnnnnnnnnnnnnnnnnnnnnnnnnnnnnnnnnnnnnnnnnnnnnnnnnnnnnnnnnnnnnnnnnnnnnnnnnnnnnnnnnnnnnnnnnnnnnnnnnnnnnnnnnnnnnnnnnnnnnnnnnnnnnnnnnnnnnnnnnnnnnnnnnnnnnnnnnnnnnnnnnnnnnnnnnnnnnnnnnnnnnnnnnnnnnnnnnnnnnnnnnnnnnnnnnnnnnnnnnnnnnnnnnnnnnnnnnnnnnnnnnnnnnnnnnnnnnnnnnnnnnnnnnnnnnnnnnnnnnnnnnnnnnnnnnnnnnnnnnnnnnnnnnnnnnnnnnnnnnnnnnnnnnnnnnnnnnnnnnnnnnnnnnnnnnnnnnnnnnnnnnnnnnnnnnnnnnnnnnnnnnnnnnnnnnnnnnnnnnnnnnnnnnnnnnnnnnnnnnnnnnnnnnnnnnnnnnnnnnnnnnnnnnnnnnnnnnnnnnnnnnnnnnnnnnnnnnnnnnnnnnnnnnnnnnnnnnnnnnnnnnnnnnnnnnnnnnnnnnnnnnnnnnnnnnnnnnnnnnnnnnnnnnnnnnnnnnnnnnnnnnnnnnnnnnnnnnnnnnnnnnnnnnnnnnnnnnnnnnnnnnnnnnnnnnnnnnnnnnnnnnnnnnnnnnnnnnnnnnnnnnnnnnnnnnnnnnnnnnnnnnnnnnnnnnnnnnnnnnnnnnnnnnnnnnnnnnnnnnnnnnnnnnnnnnnnnnnnnnnnnnnnnnnnnnnnnnnnnnnnnnnnnnnnnnnnnnnnnnnnnnnnnnnnnnnnnnnnnnnnnnnnnnnnnnnnnnnnnnnnnnnnnnnnnnnnnnnnnnnnnnnnnnnnnnnnnnnnnnnnnnnnnnnnnnnnnnnnnnnnnnnnnnnnnnnnnnnnnnnnnnnnnnnnnnnnnnnnnnnnnnnnnnnnnnnnnnnnnnnnnnnnnnnnnnnnnnnnnnnnnnnnnnnnnnnnnnnnnnnnnnnnnnnnnnnnnnnnnnnnnnnnnnnnnnnnnnnnnnnnnnnnnnnnnnnnnnnnnnnnnnnnnnnnnnnnnnnnnnnnnnnnnnnnnnnnnnnnnnnnnnnnnnnnnnnnnnnnnnnnnnnnnnnnnnnnnnnnnnnnnnnnnnnnnnnnnnnnnnnnnnnnnnnnnnnnnnnnnnnnnnnnnnnnnnnnnnnnnnnnnnnnnnnnnnnnnnnnnnnnnnnnnnnnnnnnnnnnnnnnnnnnnnnnnnnnnnnnnnnnnnnnnnnnnnnnnnnnnnnnnnnnnnnnnnnnnnnnnnnnnnnnnnnnnnnnnnnnnnnnnnnnnnnnnnnnnnnnnnnnnnnnnnnnnnnnnnnnnnnnnnnnnnnnnnnnnnnnnnnnnnnnnnnnnnnnnnnnnnnnnnnnnnnnnnnnnnnnnnnnnnnnnnnnnnnnnnnnnnnnnnnnnnnnnnnnnnnnnnnnnnnnnnnnnnnnnnnnnnnnnnnnnnnnnnnnnnnnnnnnnnnnnnnnnnnnnnnnnnnnnnnnnnnnnnnnnnnnnnnnnnnnnnnnnnnnnnnnnnnnnnnnnnnnnnnnnnnnnnnnnnnnnnnnnnnnnnnnnnnnnnnnnnnnnnnnnnnnnnnnnnnnnnnnnnnnnnnnnnnnnnnnnnnnnnnnnnnnnnnnnnnnnnnnnnnnnnnnnnnnnnnnnnnnnnnnnnnnnnnnnnnnnnnnnnnnnnnnnnnnnnnnnnnnnnnnnnnnnnnnnnnnnnnnnnnnnnnnnnnnnnnnnnnnnnnnnnnnnnnnnnnnnnnnnnnnnnnnnnnnnnnnnnnnnnnnnnnnnnnnnnnnnnnnnnnnnnnnnnnnnnnnnnnnnnnnnnnnnnnnnnnnnnnnnnnnnnnnnnnnnnnnnnnnnnnnnnnnnnnnnnnnnnnnnnnnnnnnnnnnnnnnnnnnnnnnnnnnnnnnnnnnnnnnnnnnnnnnnnnnnnnnnnnnnnnnnnnnnnnnnnnnnnnnnnnnnnnnnnnnnnnnnnnnnnnnnnnnnnnnnnnnnnnnnnnnnnnnnnnnnnnnnnnnnnnnnnnnnnnnnnnnnnnnnnnnnnnnnnnnnnnnnnnnnnnnnnnnnnnnnnnnnnnnnnnnnnnnnnnnnnnnnnnnnnnnnnnnnnnnnnnnnnnnnnnnnnnnnnnnnnnnnnnnnnnnnnnnnnnnnnnnnnnnnnnnnnnnnnnnnnnnnnnnnnnnnnnnnnnnnnnnnnnnnnnnnnnnnnnnnnnnnnnnnnnnnnnnnnnnnnnnnnnnnnnnnnnnnnnnnnnnnnnnnnnnnnnnnnnnnnnnnnnnnnnnnnnnnnnnnnnnnnnnnnnnnnnnnnnnnnnnnnnnnnnnnnnnnnnnnnnnnnnnnnnnnnnnnnnnnnnnnnnnnnnnnnnnnnnnnnnnnnnnnnnnnnnnnnnnnnnnnnnnnnnnnnnnnnnnnnnnnnnnnnnnnnnnnnnnnnnnnnnnnnnnnnnnnnnnnnnnnnnnnnnnnnnnnnnnnnnnnnnnnnnnnnnnnnnnnnnnnnnnnnnnnnnnnnnnnnnnnnnnnnnnnnnnnnnnnnnnnnnnnnnnnnnnnnnnnnnnnnnnnnnnnnnnnnnnnnnnnnnnnnnnnnnnnnnnnnnnnnnnnnnnnnnnnnnnnnnnnnnnnnnnnnnnnnnnnnnnnnnnnnnnnnnnnnnnnnnnnnnnnnnnnnnnnnnnnnnnnnnnnnnnnnnnnnnnnnnnnnnnnnnnnnnnnnnnnnnnnnnnnnnnnnnnnnnnnnnnnnnnnnnnnnnnnnnnnnnnnnnnnnnnnnnnnnnnnnnnnnnnnnnnnnnnnnnnnnnnnnnnnnnnnnnnnnnnnnnnnnnnnnnnnnnnnnnnnnnnnnnnnnnnnnnnnnnnnnnnnnnnnnnnnnnnnnnnnnnnnnnnnnnnnnnnnnnnnnnnnnnnnnnnnnnnnnnnnnnnnnnnnnnnnnnnnnnnnnnnnnnnnnnnnnnnnnnnnnnnnnnnnnnnnnnnnnnnnnnnnnnnnnnnnnnnnnnnnnnnnnnnnnnnnnnnnnnnnnnnnnnnnnnnnnnnnnnnnnnnnnnnnnnnnnnnnnnnnnnnnnnnnnnnnnnnnnnnnnnnnnnnnnnnnnnnnnnnnnnnnnnnnnnnnnnnnnnnnnnnnnnnnnnnnnnnnnnnnnnnnnnnnnnnnnnnnnnnnnnnnnnnnnnnnnnnnnnnnnnnnnnnnnnnnnnnnnnnnnnnnnnnnnnnnnnnnnnnnnnnnnnnnnnnnnnnnnnnnnnnnnnnnnnnnnnnnnnnnnnnnnnnnnnnnnnnnnnnnnnnnnnnnnnnnnnnnnnnnnnnnnnnnnnnnnnnnnnnnnnnnnnnnnnnnnnnnnnnnnnnnnnnnnnnnnnnnnnnnnnnnnnnnnnnnnnnnnnnnnnnnnnnnnnnnnnnnnnnnnnnnnnnnnnnnnnnnnnnnnnnnnnnnnnnnnnnnnnnnnnnnnnnnnnnnnnnnnnnnnnnnnnnnnnnnnnnnnnnnnnnnnnnnnnnnnnnnnnnnnnnnnnnnnnnnnnnnnnnnnnnnnnnnnnnnnnnnnnnnnnnnnnnnnnnnnnnnnnnnnnnnnnnnnnnnnnnnnnnnnnnnnnnnnnnnnnnnnnnnnnnnnnnnnnnnnnnnnnnnnnnnnnnnnnnnnnnnnnnnnnnnnnnnnnnnnnnnnnnnnnnnnnnnnnnnnnnnnnnnnnnnnnnnnnnnnnnnnnnnnnnnnnnnnnnnnnnnnnnnnnnnnnnnnnnnnnnnnnnnnnnnnnnnnnnnnnnnnnnnnnnnnnnnnnnnnnnnnnnnnnnnnnnnnnnnnnnnnnnnnnnnnnnnnnnnnnnnnnnnnnnnnnnnnnnnnnnnnnnnnnnnnnnnnnnnnnnnnnnnnnnnnnnnnnnnnnnnnnnnnnnnnnnnnnnnnnnnnnnnnnnnnnnnnnnnnnnnnnnnnnnnnnnnnnnnnnnnnnnnnnnnnnnnnnnnnnnnnnnnnnnnnnnnnnnnnnnnnnnnnnnnnnnnnnnnnnnnnnnnnnnnnnnnnnnnnnnnnnnnnnnnnnnnnnnnnnnnnnnnnnnnnnnnnnnnnnnnnnnnnnnnnnnnnnnnnnnnnnnnnnnnnnnnnnnnnnnnnnnnnnnnnnnnnnnnnnnnnnnnnnnnnnnnnnnnnnnnnnnnnnnnnnnnnnnnnnnnnnnnnnnnnnnnnnnnnnnnnnnnnnnnnnnnnnnnnnnnnnnnnnnnnnnnnnnnnnnnnnnnnnnnnnnnnnnnnnnnnnnnnnnnnnnnnnnnnnnnnnnnnnnnnnnnnnnnnnnnnnnnnnnnnnnnnnnnnnnnnnnnnnnnnnnnnnnnnnnnnnnnnnnnnnnnnnnnnnnnnnnnnnnnnnnnnnnnnnnnnnnnnnnnnnnnnnnnnnnnnnnnnnnnnnnnnnnnnnnnnnnnnnnnnnnnnnnnnnnnnnnnnnnnnnnnnnnnnnnnnnnnnnnnnnnnnnnnnnnnnnnnnnnnnnnnnnnnnnnnnnnnnnnnnnnnnnnnnnnnnnnnnnnnnnnnnnnnnnnnnnnnnnnnnnnnnnnnnnnnnnnnnnnnnnnnnnnnnnnnnnnnnnnnnnnnnnnnnnnnnnnnnnnnnnnnnnnnnnnnnnnnnnnnnnnnnnnnnnnnnnnnnnnnnnnnnnnnnnnnnnnnnnnnnnnnnnnnnnnnnnnnnnnnnnnnnnnnnnnnnnnnnnnnnnnnnnnnnnnnnnnnnnnnnnnnnnnnnnnnnnnnnnnnnnnnnnnnnnnnnnnnnnnnnnnnnnnnnnnnnnnnnnnnnnnnnnnnnnnnnnnnnnnnnnnnnnnnnnnnnnnnnnnnnnnnnnnnnnnnnnnnnnnnnnnnnnnnnnnnnnnnnnnnnnnnnnnnnnnnnnnnnnnnnnnnnnnnnnnnnnnnnnnnnnnnnnnnnnnnnnnnnnnnnnnnnnnnnnnnnnnnnnnnnnnnnnnnnnnnnnnnnnnnnnnnnnnnnnnnnnnnnnnnnnnnnnnnnnnnnnnnnnnnnnnnnnnnnnnnnnnnnnnnnnnnnnnnnnnnnnnnnnnnnnnnnnnnnnnnnnnnnnnnnnnnnnnnnnnnnnnnnnnnnnnnnnnnnnnnnnnnnnnnnnnnnnnnnnnnnnnnnnnnnnnnnnnnnnnnnnnnnnnnnnnnnnnnnnnnnnnnnnnnnnnnnnnnnnnnnnnnnnnnnnnnnnnnnnnnnnnnnnnnnnnnnnnnnnnnnnnnnnnnnnnnnnnnnnnnnnnnnnnnnnnnnnnnnnnnnnnnnnnnnnnnnnnnnnnnnnnnnnnnnnnnnnnnnnnnnnnnnnnnnnnnnnnnnnnnnnnnnnnnnnnnnnnnnnnnnnnnnnnnnnnnnnnnnnnnnnnnnnnnnnnnnnnnnnnnnnnnnnnnnnnnnnnnnnnnnnnnnnnnnnnnnnnnnnnnnnnnnnnnnnnnnnnnnnnnnnnnnnnnnnnnnnnnnnnnnnnnnnnnnnnnnnnnnnnnnnnnnnnnnnnnnnnnnnnnnnnnnnnnnnnnnnnnnnnnnnnnnnnnnnnnnnnnnnnnnnnnnnnnnnnnnnnnnnnnnnnnnnnnnnnnnnnnnnnnnnnnnnnnnnnnnnnnnnnnnnnnnnnnnnnnnnnnnnnnnnnnnnnnnnnnnnnnnnnnnnnnnnnnnnnnnnnnnnnnnnnnnnnnnnnnnnnnnnnnnnnnnnnnnnnnnnnnnnnnnnnnnnnnnnnnnnnnnnnnnnnnnnnnnnnnnnnnnnnnnnnnnnnnnnnnnnnnnnnnnnnnnnnnnnnnnnnnnnnnnnnnnnnnnnnnnnnnnnnnnnnnnnnnnnnnnnnnnnnnnnnnnnnnnnnnnnnnnnnnnnnnnnnnnnnnnnnnnnnnnnnnnnnnnnnnnnnnnnnnnnnnnnnnnnnnnnnnnnnnnnnnnnnnnnnnnnnnnnnnnnnnnnnnnnnnnnnnnnnnnnnnnnnnnnnnnnnnnnnnnnnnnnnnnnnnnnnnnnnnnnnnnnnnnnnnnnnnnnnnnnnnnnnnnnnnnnnnnnnnnnnnnnnnnnnnnnnnnnnnnnnnnnnnnnnnnnnnnnnnnnnnnnnnnnnnnnnnnnnnnnnnnnnnnnnnnnnnnnnnnnnnnnnnnnnnnnnnnnnnnnnnnnnnnnnnnnnnnnnnnnnnnnnnnnnnnnnnnnnnnnnnnnnnnnnnnnnnnnnnnnnnnnnnnnnnnnnnnnnnnnnnnnnnnnnnnnnnnnnnnnnnnnnnnnnnnnnnnnnnnnnnnnnnnnnnnnnnnnnnnnnnnnnnnnnnnnnnnnnnnnnnnnnnnnnnnnnnnnnnnnnnnnnnnnnnnnnnnnnnnnnnnnnnnnnnnnnnnnnnnnnnnnnnnnnnnnnnnnnnnnnnnnnnnnnnnnnnnnnnnnnnnnnnnnnnnnnnnnnnnnnnnnnnnnnnnnnnnnnnnnnnnnnnnnnnnnnnnnnnnnnnnnnnnnnnnnnnnnnnnnnnnnnnnnnnnnnnnnnnnnnnnnnnnnnnnnnnnnnnnnnnnnnnnnnnnnnnnnnnnnnnnnnnnnnnnnnnnnnnnnnnnnnnnnnnnnnnnnnnnnnnnnnnnnnnnnnnnnnnnnnnnnnnnnnnnnnnnnnnnnnnnnnnnnnnnnnnnnnnnnnnnnnnnnnnnnnnnnnnnnnnnnnnnnnnnnnnnnnnnnnnnnnnnnnnnnnnnnnnnnnnnnnnnnnnnnnnnnnnnnnnnnnnnnnnnnnnnnnnnnnnnnnnnnnnnnnnnnnnnnnnnnnnnnnnnnnnnnnnnnnnnnnnnnnnnnnnnnnnnnnnnnnnnnnnnnnnnnnnnnnnnnnnnnnnnnnnnnnnnnnnnnnnnnnnnnnnnnnnnnnnnnnnnnnnnnnnnnnnnnnnnnnnnnnnnnnnnnnnnnnnnnnnnnnnnnnnnnnnnnnnnnnnnnnnnnnnnnnnnnnnnnnnnnnnnnnnnnnnnnnnnnnnnnnnnnnnnnnnnnnnnnnnnnnnnnnnnnnnnnnnnnnnnnnnnnnnnnnnnnnnnnnnnnnnnnnnnnnnnnnnnnnnnnnnnnnnnnnnnnnnnnnnnnnnnnnnnnnnnnnnnnnnnnnnnnnnnnnnnnnnnnnnnnnnnnnnnnnnnnnnnnnnnnnnnnnnnnnnnnnnnnnnnnnnnnnnnnnnnnnnnnnnnnnnnnnnnnnnnnnnnnnnnnnnnnnnnnnnnnnnnnnnnnnnnnnnnnnnnnnnnnnnnnnnnnnnnnnnnnnnnnnnnnnnnnnnnnnnnnnnnnnnnnnnnnnnnnnnnnnnnnnnnnnnnnnnnnnnnnnnnnnnnnnnnnnnnnnnnnnnnnnnnnnnnnnnnnnnnnnnnnnnnnnnnnnnnnnnnnnnnnnnnnnnnnnnnnnnnnnnnnnnnnnnnnnnnnnnnnnnnnnnnnnnnnnnnnnnnnnnnnnnnnnnnnnnnnnnnnnnnnnnnnnnnnnnnnnnnnnnnnnnnnnnnnnnnnnnnnnnnnnnnnnnnnnnnnnnnnnnnnnnnnnnnnnnnnnnnnnnnnnnnnnnnnnnnnnnnnnnnnnnnnnnnnnnnnnnnnnnnnnnnnnnnnnnnnnnnnnnnnnnnnnnnnnnnnnnnnnnnnnnnnnnnnnnnnnnnnnnnnnnnnnnnnnnnnnnnnnnnnnnnnnnnnnnnnnnnnnnnnnnnnnnnnnnnnnnnnnnnnnnnnnnnnnnnnnnnnnnnnnnnnnnnnnnnnnnnnnnnnnnnnnnnnnnnnnnnnnnnnnnnnnnnnnnnnnnnnnnnnnnnnnnnnnnnnnnnnnnnnnnnnnnnnnnnnnnnnnnnnnnnnnnnnnnnnnnnnnnnnnnnnnnnnnnnnnnnnnnnnnnnnnnnnnnnnnnnnnnnnnnnnnnnnnnnnnnnnnnnnnnnnnnnnnnnnnnnnnnnnnnnnnnnnnnnnnnnnnnnnnnnnnnnnnnnnnnnnnnnnnnnnnnnnnnnnnnnnnnnnnnnnnnnnnnnnnnnnnnnnnnnnnnnnnnnnnnnnnnnnnnnnnnnnnnnnnnnnnnnnnnnnnnnnnnnnnnnnnnnnnnnnnnnnnnnnnnnnnnnnnnnnnnnnnnnnnnnnnnnnnnnnnnnnnnnnnnnnnnnnnnnnnnnnnnnnnnnnnnnnnnnnnnnnnnnnnnnnnnnnnnnnnnnnnnnnnnnnnnnnnnnnnnnnnnnnnnnnnnnnnnnnnnnnnnnnnnnnnnnnnnnnnnnnnnnnnnnnnnnnnnnnnnnnnnnnnnnnnnnnnnnnnnnnnnnnnnnnnnnnnnnnnnnnnnnnnnnnnnnnnnnnnnnnnnnnnnnnnnnnnnnnnnnnnnnnnnnnnnnnnnnnnnnnnnnnnnnnnnnnnnnnnnnnnnnnnnnnnnnnnnnnnnnnnnnnnnnnnnnnnnnnnnnnnnnnnnnnnnnnnnnnnnnnnnnnnnnnnnnnnnnnnnnnnnnnnnnnnnnnnnnnnnnnnnnnnnnnnnnnnnnnnnnnnnnnnnnnnnnnnnnnnnnnnnnnnnnnnnnnnnnnnnnnnnnnnnnnnnnnnnnnnnnnnnnnnnnnnnnnnnnnnnnnnnnnnnnnnnnnnnnnnnnnnnnnnnnnnnnnnnnnnnnnnnnnnnnnnnnnnnnnnnnnnnnnnnnnnnnnnnnnnnnnnnnnnnnnnnnnnnnnnnnnnnnnnnnnnnnnnnnnnnnnnnnnnnnnnnnnnnnnnnnnnnnnnnnnnnnnnnnnnnnnnnnnnnnnnnnnnnnnnnnnnnnnnnnnnnnnnnnnnnnnnnnnnnnnnnnnnnnnnnnnnnnnnnnnnnnnnnnnnnnnnnnnnnnnnnnnnnnnnnnnnnnnnnnnnnnnnnnnnnnnnnnnnnnnnnnnnnnnnnnnnnnnnnnnnnnnnnnnnnnnnnnnnnnnnnnnnnnnnnnnnnnnnnnnnnnnnnnnnnnnnnnnnnnnnnnnnnnnnnnnnnnnnnnnnnnnnnnnnnnnnnnnnnnnnnnnnnnnnnnnnnnnnnnnnnnnnnnnnnnnnnnnnnnnnnnnnnnnnnnnnnnnnnnnnnnnnnnnnnnnnnnnnnnnnnnnnnnnnnnnnnnnnnnnnnnnnnnnnnnnnnnnnnnnnnnnnnnnnnnnnnnnnnnnnnnnnnnnnnnnnnnnnnnnnnnnnnnnnnnnnnnnnnnnnnnnnnnnnnnnnnnnnnnnnnnnnnnnnnnnnnnnnnnnnnnnnnnnnnnnnnnnnnnnnnnnnnnnnnnnnnnnnnnnnnnnnnnnnnnnnnnnnnnnnnnnnnnnnnnnnnnnnnnnnnnnnnnnnnnnnnnnnnnnnnnnnnnnnnnnnnnnnnnnnnnnnnnnnnnnnnnnnnnnnnnnnnnnnnnnnnnnnnnnnnnnnnnnnnnnnnnnnnnnnnnnnnnnnnnnnnnnnnnnnnnnnnnnnnnnnnnnnnnnnnnnnnnnnnnnnnnnnnnnnnnnnnnnnnnnnnnnnnnnnnnnnnnnnnnnnnnnnnnnnnnnnnnnnnnnnnnnnnnnnnnnnnnnnnnnnnnnnnnnnnnnnnnnnnnnnnnnnnnnnnnnnnnnnnnnnnnnnnnnnnnnnnnnnnnnnnnnnnnnnnnnnnnnnnnnnnnnnnnnnnnnnnnnnnnnnnnnnnnnnnnnnnnnnnnnnnnnnnnnnnnnnnnnnnnnnnnnnnnnnnnnnnnnnnnnnnnnnnnnnnnnnnnnnnnnnnnnnnnnnnnnnnnnnnnnnnnnnnnnnnnnnnnnnnnnnnnnnnnnnnnnnnnnnnnnnnnnnnnnnnnnnnnnnnnnnnnnnnnnnnnnnnnnnnnnnnnnnnnnnnnnnnnnnnnnnnnnnnnnnnnnnnnnnnnnnnnnnnnnnnnnnnnnnnnnnnnnnnnnnnnnnnnnnnnnnnnnnnnnnnnnnnnnnnnnnnnnnnnnnnnnnnnnnnnnnnnnnnnnnnnnnnnnnnnnnnnnnnnnnnnnnnnnnnnnnnnnnnnnnnnnnnnnnnnnnnnnnnnnnnnnnnnnnnnnnnnnnnnnnnnnnnnnnnnnnnnnnnnnnnnnnnnnnnnnnnnnnnnnnnnnnnnnnnnnnnnnnnnnnnnnnnnnnnnnnnnnnnnnnnnnnnnnnnnnnnnnnnnnnnnnnnnnnnnnnnnnnnnnnnnnnnnnnnnnnnnnnnnnnnnnnnnnnnnnnnnnnnnnnnnnnnnnnnnnnnnnnnnnnnnnnnnnnnnnnnnnnnnnnnnnnnnnnnnnnnnnnnnnnnnnnnnnnnnnnnnnnnnnnnnnnnnnnnnnnnnnnnnnnnnnnnnnnnnnnnnnnnnnnnnnnnnnnnnnnnnnnnnnnnnnnnnnnnnnnnnnnnnnnnnnnnnnnnnnnnnnnnnnnnnnnnnnnnnnnnnnnnnnnnnnnnnnnnnnnnnnnnnnnnnnnnnnnnnnnnnnnnnnnnnnnnnnnnnnnnnnnnnnnnnnnnnnnnnnnnnnnnnnnnnnnnnnnnnnnnnnnnnnnnnnnnnnnnnnnnnnnnnnnnnnnnnnnnnnnnnnnnnnnnnnnnnnnnnnnnnnnnnnnnnnnnnnnnnnnnnnnnnnnnnnnnnnnnnnnnnnnnnnnnnnnnnnnnnnnnnnnnnnnnnnnnnnnnnnnnnnnnnnnnnnnnnnnnnnnnnnnnnnnnnnnnnnnnnnnnnnnnnnnnnnnnnnnnnnnnnnnnnnnnnnnnnnnnnnnnnnnnnnnnnnnnnnnnnnnnnnnnnnnnnnnnnnnnnnnnnnnnnnnnnnnnnnnnnnnnnnnnnnnnnnnnnnnnnnnnnnnnnnnnnnnnnnnnnnnnnnnnnnnnnnnnnnnnnnnnnnnnnnnnnnnnnnnnnnnnnnnnnnnnnnnnnnnnnnnnnnnnnnnnnnnnnnnnnnnnnnnnnnnnnnnnnnnnnnnnnnnnnnnnnnnnnnnnnnnnnnnnnnnnnnnnnnnnnnnnnnnnnnnnnnnnnnnnnnnnnnnnnnnnnnnnnnnnnnnnnnnnnnnnnnnnnnnnnnnnnnnnnnnnnnnnnnnnnnnnnnnnnnnnnnnnnnnnnnnnnnnnnnnnnnnnnnnnnnnnnnnnnnnnnnnnnnnnnnnnnnnnnnnnnnnnnnnnnnnnnnnnnnnnnnnnnnnnnnnnnnnnnnnnnnnnnnnnnnnnnnnnnnnnnnnnnnnnnnnnnnnnnnnnnnnnnnnnnnnnnnnnnnnnnnnnnnnnnnnnnnnnnnnnnnnnnnnnnnnnnnnnnnnnnnnnnnnnnnnnnnnnnnnnnnnnnnnnnnnnnnnnnnnnnnnnnnnnnnnnnnnnnnnnnnnnnnnnnnnnnnnnnnnnnnnnnnnnnnnnnnnnnnnnnnnnnnnnnnnnnnnnnnnnnnnnnnnnnnnnnnnnnnnnnnnnnnnnnnnnnnnnnnnnnnnnnnnnnnnnnnnnnnnnnnnnnnnnnnnnnnnnnnnnnnnnnnnnnnnnnnnnnnnnnnnnnnnnnnnnnnnnnnnnnnnnnnnnnnnnnnnnnnnnnnnnnnnnnnnnnnnnnnnnnnnnnnnnnnnnnnnnnnnnnnnnnnnnnnnnnnnnnnnnnnnnnnnnnnnnnnnnnnnnnnnnnnnnnnnnnnnnnnnnnnnnnnnnnnnnnnnnnnnnnnnnnnnnnnnnnnnnnnnnnnnnnnnnnnnnnnnnnnnnnnnnnnnnnnnnnnnnnnnnnnnnnnnnnnnnnnnnnnnnnnnnnnnnnnnnnnnnnnnnnnnnnnnnnnnnnnnnnnnnnnnnnnnnnnnnnnnnnnnnnnnnnnnnnnnnnnnnnnnnnnnnnnnnnnnnnnnnnnnnnnnnnnnnnnnnnnnnnnnnnnnnnnnnnnnnnnnnnnnnnnnnnnnnnnnnnnnnnnnnnnnnnnnnnnnnnnnnnnnnnnnnnnnnnnnnnnnnnnnnnnnnnnnnnnnnnnnnnnnnnnnnnnnnnnnnnnnnnnnnnnnnnnnnnnnnnnnnnnnnnnnnnnnnnnnnnnnnnnnnnnnnnnnnnnnnnnnnnnnnnnnnnnnnnnnnnnnnnnnnnnnnnnnnnnnnnnnnnnnnnnnnnnnnnnnnnnnnnnnnnnnnnnnnnnnnnnnnnnnnnnnnnnnnnnnnnnnnnnnnnnnnnnnnnnnnnnnnnnnnnnnnnnnnnnnnnnnnnnnnnnnnnnnnnnnnnnnnnnnnnnnnnnnnnnnnnnnnnnnnnnnnnnnnnnnnnnnnnnnnnnnnnnnnnnnnnnnnnnnnnnnnnnnnnnnnnnnnnnnnnnnnnnnnnnnnnnnnnnnnnnnnnnnnnnnnnnnnnnnnnnnnnnnnnnnnnnnnnnnnnnnnnnnnnnnnnnnnnnnnnnnnnnnnnnnnnnnnnnnnnnnnnnnnnnnnnnnnnnnnnnnnnnnnnnnnnnnnnnnnnnnnnnnnnnnnnnnnnnnnnnnnnnnnnnnnnnnnnnnnnnnnnnnnnnnnnnnnnnnnnnnnnnnnnnnnnnnnnnnnnnnnnnnnnnnnnnnnnnnnnnnnnnnnnnnnnnnnnnnnnnnnnnnnnnnnnnnnnnnnnnnnnnnnnnnnnnnnnnnnnnnnnnnnnnnnnnnnnnnnnnnnnnnnnnnnnnnnnnnnnnnnnnnnnnnnnnnnnnnnnnnnnnnnnnnnnnnnnnnnnnnnnnnnnnnnnnnnnnnnnnnnnnnnnnnnnnnnnnnnnnnnnnnnnnnnnnnnnnnnnnnnnnnnnnnnnnnnnnnnnnnnnnnnnnnnnnnnnnnnnnnnnnnnnnnnnnnnnnnnnnnnnnnnnnnnnnnnnnnnnnnnnnnnnnnnnnnnnnnnnnnnnnnnnnnnnnnnnnnnnnnnnnnnnnnnnnnnnnnnnnnnnnnnnnnnnnnnnnnnnnnnnnnnnnnnnnnnnnnnnnnnnnnnnnnnnnnnnnnnnnnnnnnnnnnnnnnnnnnnnnnnnnnnnnnnnnnnnnnnnnnnnnnnnnnnnnnnnnnnnnnnnnnnnnnnnnnnnnnnnnnnnnnnnnnnnnnnnnnnnnnnnnnnnnnnnnnnnnnnnnnnnnnnnnnnnnnnnnnnnnnnnnnnnnnnnnnnnnnnnnnnnnnnnnnnnnnnnnnnnnnnnnnnnnnnnnnnnnnnnnnnnnnnnnnnnnnnnnnnnnnnnnnnnnnnnnnnnnnnnnnnnnnnnnnnnnnnnnnnnnnnnnnnnnnnnnnnnnnnnnnnnnnnnnnnnnnnnnnnnnnnnnnnnnnnnnnnnnnnnnnnnnnnnnnnnnnnnnnnnnnnnnnnnnnnnnnnnnnnnnnnnnnnnnnnnnnnnnnnnnnnnnnnnnnnnnnnnnnnnnnnnnnnnnnnnnnnnnnnnnnnnnnnnnnnnnnnnnnnnnnnnnnnnnnnnnnnnnnnnnnnnnnnnnnnnnnnnnnnnnnnnnnnnnnnnnnnnnnnnnnnnnnnnnnnnnnnnnnnnnnnnnnnnnnnnnnnnnnnnnnnnnnnnnnnnnnnnnnnnnnnnnnnnnnnnnnnnnnnnnnnnnnnnnnnnnnnnnnnnnnnnnnnnnnnnnnnnnnnnnnnnnnnnnnnnnnnnnnnnnnnnnnnnnnnnnnnnnnnnnnnnnnnnnnnnnnnnnnnnnnnnnnnnnnnnnnnnnnnnnnnnnnnnnnnnnnnnnnnnnnnnnnnnnnnnnnnnnnnnnnnnnnnnnnnnnnnnnnnnnnnnnnnnnnnnnnnnnnnnnnnnnnnnnnnnnnnnnnnnnnnnnnnnnnnnnnnnnnnnnnnnnnnnnnnnnnnnnnnnnnnnnnnnnnnnnnnnnnnnnnnnnnnnnnnnnnnnnnnnnnnnnnnnnnnnnnnnnnnnnnnnnnnnnnnnnnnnnnnnnnnnnnnnnnnnnnnnnnnnnnnnnnnnnnnnnnnnnnnnnnnnnnnnnnnnnnnnnnnnnnnnnnnnnnnnnnnnnnnnnnnnnnnnnnnnnnnnnnnnnnnnnnnnnnnnnnnnnnnnnnnnnnnnnnnnnnnnnnnnnnnnnnnnnnnnnnnnnnnnnnnnnnnnnnnnnnnnnnnnnnnnnnnnnnnnnnnnnnnnnnnnnnnnnnnnnnnnnnnnnnnnnnnnnnnnnnnnnnnnnnnnnnnnnnnnnnnnnnnnnnnnnnnnnnnnnnnnnnnnnnnnnnnnnnnnnnnnnnnnnnnnnnnnnnnnnnnnnnnnnnnnnnnnnnnnnnnnnnnnnnnnnnnnnnnnnnnnnnnnnnnnnnnnnnnnnnnnnnnnnnnnnnnnnnnnnnnnnnnnnnnnnnnnnnnnnnnnnnnnnnnnnnnnnnnnnnnnnnnnnnnnnnnnnnnnnnnnnnnnnnnnnnnnnnnnnnnnnnnnnnnnnnnnnnnnnnnnnnnnnnnnnnnnnnnnnnnnnnnnnnnnnnnnnnnnnnnnnnnnnnnnnnnnnnnnnnnnnnnnnnnnnnnnnnnnnnnnnnnnnnnnnnnnnnnnnnnnnnnnnnnnnnnnnnnnnnnnnnnnnnnnnnnnnnnnnnnnnnnnnnnnnnnnnnnnnnnnnnnnnnnnnnnnnnnnnnnnnnnnnnnnnnnnnnnnnnnnnnnnnnnnnnnnnnnnnnnnnnnnnnnnnnnnnnnnnnnnnnnnnnnnnnnnnnnnnnnnnnnnnnnnnnnnnnnnnnnnnnnnnnnnnnnnnnnnnnnnnnnnnnnnnnnnnnnnnnnnnnnnnnnnnnnnnnnnnnnnnnnnnnnnnnnnnnnnnnnnnnnnnnnnnnnnnnnnnnnnnnnnnnnnnnnnnnnnnnnnnnnnnnnnnnnnnnnnnnnnnnnnnnnnnnnnnnnnnnnnnnnnnnnnnnnnnnnnnnnnnnnnnnnnnnnnnnnnnnnnnnnnnnnnnnnnnnnnnnnnnnnnnnnnnnnnnnnnnnnnnnnnnnnnnnnnnnnnnnnnnnnnnnnnnnnnnnnnnnnnnnnnnnnnnnnnnnnnnnnnnnnnnnnnnnnnnnnnnnnnnnnnnnnnnnnnnnnnnnnnnnnnnnnnnnnnnnnnnnnnnnnnnnnnnnnnnnnnnnnnnnnnnnnnnnnnnnnnnnnnnnnnnnnnnnnnnnnnnnnnnnnnnnnnnnnnnnnnnnnnnnnnnnnnnnnnnnnnnnnnnnnnnnnnnnnnnnnnnnnnnnnnnnnnnnnnnnnnnnnnnnnnnnnnnnnnnnnnnnnnnnnnnnnnnnnnnnnnnnnnnnnnnnnnnnnnnnnnnnnnnnnnnnnnnnnnnnnnnnnnnnnnnnnnnnnnnnnnnnnnnnnnnnnnnnnnnnnnnnnnnnnnnnnnnnnnnnnnnnnnnnnnnnnnnnnnnnnnnnnnnnnnnnnnnnnnnnnnnnnnnnnnnnnnnnnnnnnnnnnnnnnnnnnnnnnnnnnnnnnnnnnnnnnnnnnnnnnnnnnnnnnnnnnnnnnnnnnnnnnnnnnnnnnnnnnnnnnnnnnnnnnnnnnnnnnnnnnnnnnnnnnnnnnnnnnnnnnnnnnnnnnnnnnnnnnnnnnnnnnnnnnnnnnnnnnnnnnnnnnnnnnnnnnnnnnnnnnnnnnnnnnnnnnnnnnnnnnnnnnnnnnnnnnnnnnnnnnnnnnnnnnnnnnnnnnnnnnnnnnnnnnnnnnnnnnnnnnnnnnnnnnnnnnnnnnnnnnnnnnnnnnnnnnnnnnnnnnnnnnnnnnnnnnnnnnnnnnnnnnnnnnnnnnnnnnnnnnnnnnnnnnnnnnnnnnnnnnnnnnnnnnnnnnnnnnnnnnnnnnnnnnnnnnnnnnnnnnnnnnnnnnnnnnnnnnnnnnnnnnnnnnnnnnnnnnnnnnnnnnnnnnnnnnnnnnnnnnnnnnnnnnnnnnnnnnnnnnnnnnnnnnnnnnnnnnnnnnnnnnnnnnnnnnnnnnnnnnnnnnnnnnnnnnnnnnnnnnnnnnnnnnnnnnnnnnnnnnnnnnnnnnnnnnnnnnnnnnnnnnnnnnnnnnnnnnnnnnnnnnnnnnnnnnnnnnnnnnnnnnnnnnnnnnnnnnnnnnnnnnnnnnnnnnnnnnnnnnnnnnnnnnnnnnnnnnnnnnnnnnnnnnnnnnnnnnnnnnnnnnnnnnnnnnnnnnnnnnnnnnnnnnnnnnnnnnnnnnnnnnnnnnnnnnnnnnnnnnnnnnnnnnnnnnnnnnnnnnnnnnnnnnnnnnnnnnnnnnnnnnnnnnnnnnnnnnnnnnnnnnnnnnnnnnnnnnnnnnnnnnnnnnnnnnnnnnnnnnnnnnnnnnnnnnnnnnnnnnnnnnnnnnnnnnnnnnnnnnnnnnnnnnnnnnnnnnnnnnnnnnnnnnnnnnnnnnnnnnnnnnnnnnnnnnnnnnnnnnnnnnnnnnnnnnnnnnnnnnnnnnnnnnnnnnnnnnnnnnnnnnnnnnnnnnnnnnnnnnnnnnnnnnnnnnnnnnnnnnnnnnnnnnnnnnnnnnnnnnnnnnnnnnnnnnnnnnnnnnnnnnnnnnnnnnnnnnnnnnnnnnnnnnnnnnnnnnnnnnnnnnnnnnnnnnnnnnnnnnnnnnnnnnnnnnnnnnnnnnnnnnnnnnnnnnnnnnnnnnnnnnnnnnnnnnnnnnnnnnnnnnnnnnnnnnnnnnnnnnnnnnnnnnnnnnnnnnnnnnnnnnnnnnnnnnnnnnnnnnnnnnnnnnnnnnnnnnnnnnnnnnnnnnnnnnnnnnnnnnnnnnnnnnnnnnnnnnnnnnnnnnnnnnnnnnnnnnnnnnnnnnnnnnnnnnnnnnnnnnnnnnnnnnnnnnnnnnnnnnnnnnnnnnnnnnnnnnnnnnnnnnnnnnnnnnnnnnnnnnnnnnnnnnnnnnnnnnnnnnnnnnnnnnnnnnnnnnnnnnnnnnnnnnnnnnnnnnnnnnnnnnnnnnnnnnnnnnnnnnnnnnnnnnnnnnnnnnnnnnnnnnnnnnnnnnnnnnnnnnnnnnnnnnnnnnnnnnnnnnnnnnnnnnnnnnnnnnnnnnnnnnnnnnnnnnnnnnnnnnnnnnnnnnnnnnnnnnnnnnnnnnnnnnnnnnnnnnnnnnnnnnnnnnnnnnnnnnnnnnnnnnnnnnnnnnnnnnnnnnnnnnnnnnnnnnnnnnnnnnnnnnnnnnnnnnnnnnnnnnnnnnnnnnnnnnnnnnnnnnnnnnnnnnnnnnnnnnnnnnnnnnnnnnnnnnnnnnnnnnnnnnnnnnnnnnnnnnnnnnnnnnnnnnnnnnnnnnnnnnnnnnnnnnnnnnnnnnnnnnnnnnnnnnnnnnnnnnnnnnnnnnnnnnnnnnnnnnnnnnnnnnnnnnnnnnnnnnnnnnnnnnnnnnnnnnnnnnnnnnnnnnnnnnnnnnnnnnnnnnnnnnnnnnnnnnnnnnnnnnnnnnnnnnnnnnnnnnnnnnnnnnnnnnnnnnnnnnnnnnnnnnnnnnnnnnnnnnnnnnnnnnnnnnnnnnnnnnnnnnnnnnnnnnnnnnnnnnnnnnnnnnnnnnnnnnnnnnnnnnnnnnnnnnnnnnnnnnnnnnnnnnnnnnnnnnnnnnnnnnnnnnnnnnnnnnnnnnnnnnnnnnnnnnnnnnnnnnnnnnnnnnnnnnnnnnnnnnnnnnnnnnnnnnnnnnnnnnnnnnnnnnnnnnnnnnnnnnnnnnnnnnnnnnnnnnnnnnnnnnnnnnnnnnnnnnnnnnnnnnnnnnnnnnnnnnnnnnnnnnnnnnnnnnnnnnnnnnnnnnnnnnnnnnnnnnnnnnnnnnnnnnnnnnnnnnnnnnnnnnnnnnnnnnnnnnnnnnnnnnnnnnnnnnnnnnnnnnnnnnnnnnnnnnnnnnnnnnnnnnnnnnnnnnnnnnnnnnnnnnnnnnnnnnnnnnnnnnnnnnnnnnnnnnnnnnnnnnnnnnnnnnnnnnnnnnnnnnnnnnnnnnnnnnnnnnnnnnnnnnnnnnnnnnnnnnnnnnnnnnnnnnnnnnnnnnnnnnnnnnnnnnnnnnnnnnnnnnnnnnnnnnnnnnnnnnnnnnnnnnnnnnnnnnnnnnnnnnnnnnnnnnnnnnnnnnnnnnnnnnnnnnnnnnnnnnnnnnnnnnnnnnnnnnnnnnnnnnnnnnnnnnnnnnnnnnnnnnnnnnnnnnnnnnnnnnnnnnnnnnnnnnnnnnnnnnnnnnnnnnnnnnnnnnnnnnnnnnnnnnnnnnnnnnnnnnnnnnnnnnnnnnnnnnnnnnnnnnnnnnnnnnnnnnnnnnnnnnnnnnnnnnnnnnnnnnnnnnnnnnnnnnnnnnnnnnnnnnnnnnnnnnnnnnnnnnnnnnnnnnnnnnnnnnnnnnnnnnnnnnnnnnnnnnnnnnnnnnnnnnnnnnnnnnnnnnnnnnnnnnnnnnnnnnnnnnnnnnnnnnnnnnnnnnnnnnnnnnnnnnnnnnnnnnnnnnnnnnnnnnnnnnnnnnnnnnnnnnnnnnnnnnnnnnnnnnnnnnnnnnnnnnnnnnnnnnnnnnnnnnnnnnnnnnnnnnnnnnnnnnnnnnnnnnnnnnnnnnnnnnnnnnnnnnnnnnnnnnnnnnnnnnnnnnnnnnnnnnnnnnnnnnnnnnnnnnnnnnnnnnnnnnnnnnnnnnnnnnnnnnnnnnnnnnnnnnnnnnnnnnnnnnnnnnnnnnnnnnnnnnnnnnnnnnnnnnnnnnnnnnnnnnnnnnnnnnnnnnnnnnnnnnnnnnnnnnnnnnnnnnnnnnnnnnnnnnnnnnnnnnnnnnnnnnnnnnnnnnnnnnnnnnnnnnnnnnnnnnnnnnnnnnnnnnnnnnnnnnnnnnnnnnnnnnnnnnnnnnnnnnnnnnnnnnnnnnnnnnnnnnnnnnnnnnnnnnnnnnnnnnnnnnnnnnnnnnnnnnnnnnnnnnnnnnnnnnnnnnnnnnnnnnnnnnnnnnnnnnnnnnnnnnnnnnnnnnnnnnnnnnnnnnnnnnnnnnnnnnnnnnnnnnnnnnnnnnnnnnnnnnnnnnnnnnnnnnnnnnnnnnnnnnnnnnnnnnnnnnnnnnnnnnnnnnnnnnnnnnnnnnnnnnnnnnnnnnnnnnnnnnnnnnnnnnnnnnnnnnnnnnnnnnnnnnnnnnnnnnnnnnnnnnnnnnnnnnnnnnnnnnnnnnnnnnnnnnnnnnnnnnnnnnnnnnnnnnnnnnnnnnnnnnnnnnnnnnnnnnnnnnnnnnnnnnnnnnnnnnnnnnnnnnnnnnnnnnnnnnnnnnnnnnnnnnnnnnnnnnnnnnnnnnnnnnnnnnnnnnnnnnnnnnnnnnnnnnnnnnnnnnnnnnnnnnnnnnnnnnnnnnnnnnnnnnnnnnnnnnnnnnnnnnnnnnnnnnnnnnnnnnnnnnnnnnnnnnnnnnnnnnnnnnnnnnnnnnnnnnnnnnnnnnnnnnnnnnnnnnnnnnnnnnnnnnnnnnnnnnnnnnnnnnnnnnnnnnnnnnnnnnnnnnnnnnnnnnnnnnnnnnnnnnnnnnnnnnnnnnnnnnnnnnnnnnnnnnnnnnnnnnnnnnnnnnnnnnnnnnnnnnnnnnnnnnnnnnnnnnnnnnnnnnnnnnnnnnnnnnnnnnnnnnnnnnnnnnnnnnnnnnnnnnnnnnnnnnnnnnnnnnnnnnnnnnnnnnnnnnnnnnnnnnnnnnnnnnnnnnnnnnnnnnnnnnnnnnnnnnnnnnnnnnnnnnnnnnnnnnnnnnnnnnnnnnnnnnnnnnnnnnnnnnnnnnnnnnnnnnnnnnnnnnnnnnnnnnnnnnnnnnnnnnnnnnnnnnnnnnnnnnnnnnnnnnnnnnnnnnnnnnnnnnnnnnnnnnnnnnnnnnnnnnnnnnnnnnnnnnnnnnnnnnnnnnnnnnnnnnnnnnnnnnnnnnnnnnnnnnnnnnnnnnnnnnnnnnnnnnnnnnnnnnnnnnnnnnnnnnnnnnnnnnnnnnnnnnnnnnnnnnnnnnnnnnnnnnnnnnnnnnnnnnnnnnnnnnnnnnnnnnnnnnnnnnnnnnnnnnnnnnnnnnnnnnnnnnnnnnnnnnnnnnnnnnnnnnnnnnnnnnnnnnnnnnnnnnnnnnnnnnnnnnnnnnnnnnnnnnnnnnnnnnnnnnnnnnnnnnnnnnnnnnnnnnnnnnnnnnnnnnnnnnnnnnnnnnnnnnnnnnnnnnnnnnnnnnnnnnnnnnnnnnnnnnnnnnnnnnnnnnnnnnnnnnnnnnnnnnnnnnnnnnnnnnnnnnnnnnnnnnnnnnnnnnnnnnnnnnnnnnnnnnnnnnnnnnnnnnnnnnnnnnnnnnnnnnnnnnnnnnnnnnnnnnnnnnnnnnnnnnnnnnnnnnnnnnnnnnnnnnnnnnnnnnnnnnnnnnnnnnnnnnnnnnnnnnnnnnnnnnnnnnnnnnnnnnnnnnnnnnnnnnnnnnnnnnnnnnnnnnnnnnnnnnnnnnnnnnnnnnnnnnnnnnnnnnnnnnnnnnnnnnnnnnnnnnnnnnnnnnnnnnnnnnnnnnnnnnnnnnnnnnnnnnnnnnnnnnnnnnnnnnnnnnnnnnnnnnnnnnnnnnnnnnnnnnnnnnnnnnnnnnnnnnnnnnnnnnnnnnnnnnnnnnnnnnnnnnnnnnnnnnnnnnnnnnnnnnnnnnnnnnnnnnnnnnnnnnnnnnnnnnnnnnnnnnnnnnnnnnnnnnnnnnnnnnnnnnnnnnnnnnnnnnnnnnnnnnnnnnnnnnnnnnnnnnnnnnnnnnnnnnnnnnnnnnnnnnnnnnnnnnnnnnnnnnnnnnnnnnnnnnnnnnnnnnnnnnnnnnnnnnnnnnnnnnnnnnnnnnnnnnnnnnnnnnnnnnnnnnnnnnnnnnnnnnnnnnnnnnnnnnnnnnnnnnnnnnnnnnnnnnnnnnnnnnnnnnnnnnnnnnnnnnnnnnnnnnnnnnnnnnnnnnnnnnnnnnnnnnnnnnnnnnnnnnnnnnnnnnnnnnnnnnnnnnnnnnnnnnnnnnnnnnnnnnnnnnnnnnnnnnnnnnnnnnnnnnnnnnnnnnnnnnnnnnnnnnnnnnnnnnnnnnnnnnnnnnnnnnnnnnnnnnnnnnnnnnnnnnnnnnnnnnnnnnnnnnnnnnnnnnnnnnnnnnnnnnnnnnnnnnnnnnnnnnnnnnnnnnnnnnnnnnnnnnnnnnnnnnnnnnnnnnnnnnnnnnnnnnnnnnnnnnnnnnnnnnnnnnnnnnnnnnnnnnnnnnnnnnnnnnnnnnnnnnnnnnnnnnnnnnnnnnnnnnnnnnnnnnnnnnnnnnnnnnnnnnnnnnnnnnnnnnnnnnnnnnnnnnnnnnnnnnnnnnnnnnnnnnnnnnnnnnnnnnnnnnnnnnnnnnnnnnnnnnnnnnnnnnnnnnnnnnnnnnnnnnnnnnnnnnnnnnnnnnnnnnnnnnnnnnnnnnnnnnnnnnnnnnnnnnnnnnnnnnnnnnnnnnnnnnnnnnnnnnnnnnnnnnnnnnnnnnnnnnnnnnnnnnnnnnnnnnnnnnnnnnnnnnnnnnnnnnnnnnnnnnnnnnnnnnnnnnnnnnnnnnnnnnnnnnnnnnnnnnnnnnnnnnnnnnnnnnnnnnnnnnnnnnnnnnnnnnnnnnnnnnnnnnnnnnnnnnnnnnnnnnnnnnnnnnnnnnnnnnnnnnnnnnnnnnnnnnnnnnnnnnnnnnnnnnnnnnnnnnnnnnnnnnnnnnnnnnnnnnnnnnnnnnnnnnnnnnnnnnnnnnnnnnnnnnnnnnnnnnnnnnnnnnnnnnnnnnnnnnnnnnnnnnnnnnnnnnnnnnnnnnnnnnnnnnnnnnnnnnnnnnnnnnnnnnnnnnnnnnnnnnnnnnnnnnnnnnnnnnnnnnnnnnnnnnnnnnnnnnnnnnnnnnnnnnnnnnnnnnnnnnnnnnnnnnnnnnnnnnnnnnnnnnnnnnnnnnnnnnnnnnnnnnnnnnnnnnnnnnnnnnnnnnnnnnnnnnnnnnnnnnnnnnnnnnnnnnnnnnnnnnnnnnnnnnnnnnnnnnnnnnnnnnnnnnnnnnnnnnnnnnnnnnnnnnnnnnnnnnnnnnnnnnnnnnnnnnnnnnnnnnnnnnnnnnnnnnnnnnnnnnnnnnnnnnnnnnnnnnnnnnnnnnnnnnnnnnnnnnnnnnnnnnnnnnnnnnnnnnnnnnnnnnnnnnnnnnnnnnnnnnnnnnnnnnnnnnnnnnnnnnnnnnnnnnnnnnnnnnnnnnnnnnnnnnnnnnnnnnnnnnnnnnnnnnnnnnnnnnnnnnnnnnnnnnnnnnnnnnnnnnnnnnnnnnnnnnnnnnnnnnnnnnnnnnnnnnnnnnnnnnnnnnnnnnnnnnnnnnnnnnnnnnnnnnnnnnnnnnnnnnnnnnnnnnnnnnnnnnnnnnnnnnnnnnnnnnnnnnnnnnnnnnnnnnnnnnnnnnnnnnnnnnnnnnnnnnnnnnnnnnnnnnnnnnnnnnnnnnnnnnnnnnnnnnnnnnnnnnnnnnnnnnnnnnnnnnnnnnnnnnnnnnnnnnnnnnnnnnnnnnnnnnnnnnnnnnnnnnnnnnnnnnnnnnnnnnnnnnnnnnnnnnnnnnnnnnnnnnnnnnnnnnnnnnnnnnnnnnnnnnnnnnnnnnnnnnnnnnnnnnnnnnnnnnnnnnnnnnnnnnnnnnnnnnnnnnnnnnnnnnnnnnnnnnnnnnnnnnnnnnnnnnnnnnnnnnnnnnnnnnnnnnnnnnnnnnnnnnnnnnnnnnnnnnnnnnnnnnnnnnnnnnnnnnnnnnnnnnnnnnnnnnnnnnnnnnnnnnnnnnnnnnnnnnnnnnnnnnnnnnnnnnnnnnnnnnnnnnnnnnnnnnnnnnnnnnnnnnnnnnnnnnnnnnnnnnnnnnnnnnnnnnnnnnnnnnnnnnnnnnnnnnnnnnnnnnnnnnnnnnnnnnnnnnnnnnnnnnnnnnnnnnnnnnnnnnnnnnnnnnnnnnnnnnnnnnnnnnnnnnnnnnnnnnnnnnnnnnnnnnnnnnnnnnnnnnnnnnnnnnnnnnnnnnnnnnnnnnnnnnnnnnnnnnnnnnnnnnnnnnnnnnnnnnnnnnnnnnnnnnnnnnnnnnnnnnnnnnnnnnnnnnnnnnnnnnnnnnnnnnnnnnnnnnnnnnnnnnnnnnnnnnnnnnnnnnnnnnnnnnnnnnnnnnnnnnnnnnnnnnnnnnnnnnnnnnnnnnnnnnnnnnnnnnnnnnnnnnnnnnnnnnnnnnnnnnnnnnnnnnnnnnnnnnnnnnnnnnnnnnnnnnnnnnnnnnnnnnnnnnnnnnnnnnnnnnnnnnnnnnnnnnnnnnnnnnnnnnnnnnnnnnnnnnnnnnnnnnnnnnnnnnnnnnnnnnnnnnnnnnnnnnnnnnnnnnnnnnnnnnnnnnnnnnnnnnnnnnnnnnnnnnnnnnnnnnnnnnnnnnnnnnnnnnnnnnnnnnnnnnnnnnnnnnnnnnnnnnnnnnnnnnnnnnnnnnnnnnnnnnnnnnnnnnnnnnnnnnnnnnnnnnnnnnnnnnnnnnnnnnnnnnnnnnnnnnnnnnnnnnnnnnnnnnnnnnnnnnnnnnnnnnnnnnnnnnnnnnnnnnnnnnnnnnnnnnnnnnnnnnnnnnnnnnnnnnnnnnnnnnnnnnnnnnnnnnnnnnnnnnnnnnnnnnnnnnnnnnnnnnnnnnnnnnnnnnnnnnnnnnnnnnnnnnnnnnnnnnnnnnnnnnnnnnnnnnnnnnnnnnnnnnnnnnnnnnnnnnnnnnnnnnnnnnnnnnnnnnnnnnnnnnnnnnnnnnnnnnnnnnnnnnnnnnnnnnnnnnnnnnnnnnnnnnnnnnnnnnnnnnnnnnnnnnnnnnnnnnnnnnnnnnnnnnnnnnnnnnnnnnnnnnnnnnnnnnnnnnnnnnnnnnnnnnnnnnnnnnnnnnnnnnnnnnnnnnnnnnnnnnnnnnnnnnnnnnnnnnnnnnnnnnnnnnnnnnnnnnnnnnnnnnnnnnnnnnnnnnnnnnnnnnnnnnnnnnnnnnnnnnnnnnnnnnnnnnnnnnnnnnnnnnnnnnnnnnnnnnnnnnnnnnnnnnnnnnnnnnnnnnnnnnnnnnnnnnnnnnnnnnnnnnnnnnnnnnnnnnnnnnnnnnnnnnnnnnnnnnnnnnnnnnnnnnnnnnnnnnnnnnnnnnnnnnnnnnnnnnnnnnnnnnnnnnnnnnnnnnnnnnnnnnnnnnnnnnnnnnnnnnnnnnnnnnnnnnnnnnnnnnnnnnnnnnnnnnnnnnnnnnnnnnnnnnnnnnnnnnnnnnnnnnnnnnnnnnnnnnnnnnnnnnnnnnnnnnnnnnnnnnnnnnnnnnnnnnnnnnnnnnnnnnnnnnnnnnnnnnnnnnnnnnnnnnnnnnnnnnnnnnnnnnnnnnnnnnnnnnnnnnnnnnnnnnnnnnnnnnnnnnnnnnnnnnnnnnnnnnnnnnnnnnnnnnnnnnnnnnnnnnnnnnnnnnnnnnnnnnnnnnnnnnnnnnnnnnnnnnnnnnnnnnnnnnnnnnnnnnnnnnnnnnnnnnnnnnnnnnnnnnnnnnnnnnnnnnnnnnnnnnnnnnnnnnnnnnnnnnnnnnnnnnnnnnnnnnnnnnnnnnnnnnnnnnnnnnnnnnnnnnnnnnnnnnnnnnnnnnnnnnnnnnnnnnnnnnnnnnnnnnnnnnnnnnnnnnnnnnnnnnnnnnnnnnnnnnnnnnnnnnnnnnnnnnnnnnnnnnnnnnnnnnnnnnnnnnnnnnnnnnnnnnnnnnnnnnnnnnnnnnnnnnnnnnnnnnnnnnnnnnnnnnnnnnnnnnnnnnnnnnnnnnnnnnnnnnnnnnnnnnnnnnnnnnnnnnnnnnnnnnnnnnnnnnnnnnnnnnnnnnnnnnnnnnnnnnnnnnnnnnnnnnnnnnnnnnnnnnnnnnnnnnnnnnnnnnnnnnnnnnnnnnnnnnnnnnnnnnnnnnnnnnnnnnnnnnnnnnnnnnnnnnnnnnnnnnnnnnnnnnnnnnnnnnnnnnnnnnnnnnnnnnnnnnnnnnnnnnnnnnnnnnnnnnnnnnnnnnnnnnnnnnnnnnnnnnnnnnnnnnnnnnnnnnnnnnnnnnnnnnnnnnnnnnnnnnnnnnnnnnnnnnnnnnnnnnnnnnnnnnnnnnnnnnnnnnnnnnnnnnnnnnnnnnnnnnnnnnnnnnnnnnnnnnnnnnnnnnnnnnnnnnnnnnnnnnnnnnnnnnnnnnnnnnnnnnnnnnnnnnnnnnnnnnnnnnnnnnnnnnnnnnnnnnnnnnnnnnnnnnnnnnnnnnnnnnnnnnnnnnnnnnnnnnnnnnnnnnnnnnnnnnnnnnnnnnnnnnnnnnnnnnnnnnnnnnnnnnnnnnnnnnnnnnnnnnnnnnnnnnnnnnnnnnnnnnnnnnnnnnnnnnnnnnnnnnnnnnnnnnnnnnnnnnnnnnnnnnnnnnnnnnnnnnnnnnnnnnnnnnnnnnnnnnnnnnnnnnnnnnnnnnnnnnnnnnnnnnnnnnnnnnnnnnnnnnnnnnnnnnnnnnnnnnnnnnnnnnnnnnnnnnnnnnnnnnnnnnnnnnnnnnnnnnnnnnnnnnnnnnnnnnnnnnnnnnnnnnnnnnnnnnnnnnnnnnnnnnnnnnnnnnnnnnnnnnnnnnnnnnnnnnnnnnnnnnnnnnnnnnnnnnnnnnnnnnnnnnnnnnnnnnnnnnnnnnnnnnnnnnnnnnnnnnnnnnnnnnnnnnnnnnnnnnnnnnnnnnnnnnnnnnnnnnnnnnnnnnnnnnnnnnnnnnnnnnnnnnnnnnnnnnnnnnnnnnnnnnnnnnnnnnnnnnnnnnnnnnnnnnnnnnnnnnnnnnnnnnnnnnnnnnnnnnnnnnnnnnnnnnnnnnnnnnnnnnnnnnnnnnnnnnnnnnnnnnnnnnnnnnnnnnnnnnnnnnnnnnnnnnnnnnnnnnnnnnnnnnnnnnnnnnnnnnnnnnnnnnnnnnnnnnnnnnnnnnnnnnnnnnnnnnnnnnnnnnnnnnnnnnnnnnnnnnnnnnnnnnnnnnnnnnnnnnnnnnnnnnnnnnnnnnnnnnnnnnnnnnnnnnnnnnnnnnnnnnnnnnnnnnnnnnnnnnnnnnnnnnnnnnnnnnnnnnnnnnnnnnnnnnnnnnnnnnnnnnnnnnnnnnnnnnnnnnnnnnnnnnnnnnnnnnnnnnnnnnnnnnnnnnnnnnnnnnnnnnnnnnnnnnnnnnnnnnnnnnnnnnnnnnnnnnnnnnnnnnnnnnnnnnnnnnnnnnnnnnnnnnnnnnnnnnnnnnnnnnnnnnnnnnnnnnnnnnnnnnnnnnnnnnnnnnnnnnnnnnnnnnnnnnnnnnnnnnnnnnnnnnnnnnnnnnnnnnnnnnnnnnnnnnnnnnnnnnnnnnnnnnnnnnnnnnnnnnnnnnnnnnnnnnnnnnnnnnnnnnnnnnnnnnnnnnnnnnnnnnnnnnnnnnnnnnnnnnnnnnnnnnnnnnnnnnnnnnnnnnnnnnnnnnnnnnnnnnnnnnnnnnnnnnnnnnnnnnnnnnnnnnnnnnnnnnnnnnnnnnnnnnnnnnnnnnnnnnnnnnnnnnnnnnnnnnnnnnnnnnnnnnnnnnnnnnnnnnnnnnnnnnnnnnnnnnnnnnnnnnnnnnnnnnnnnnnnnnnnnnnnnnnnnnnnnnnnnnnnnnnnnnnnnnnnnnnnnnnnnnnnnnnnnnnnnnnnnnnnnnnnnnnnnnnnnnnnnnnnnnnnnnnnnnnnnnnnnnnnnnnnnnnnnnnnnnnnnnnnnnnnnnnnnnnnnnnnnnnnnnnnnnnnnnnnnnnnnnnnnnnnnnnnnnnnnnnnnnnnnnnnnnnnnnnnnnnnnnnnnnnnnnnnnnnnnnnnnnnnnnnnnnnnnnnnnnnnnnnnnnnnnnnnnnnnnnnnnnnnnnnnnnnnnnnnnnnnnnnnnnnnnnnnnnnnnnnnnnnnnnnnnnnnnnnnnnnnnnnnnnnnnnnnnnnnnnnnnnnnnnnnnnnnnnnnnnnnnnnnnnnnnnnnnnnnnnnnnnnnnnnnnnnnnnnnnnnnnnnnnnnnnnnnnnnnnnnnnnnnnnnnnnnnnnnnnnnnnnnnnnnnnnnnnnnnnnnnnnnnnnnnnnnnnnnnnnnnnnnnnnnnnnnnnnnnnnnnnnnnnnnnnnnnnnnnnnnnnnnnnnnnnnnnnnnnnnnnnnnnnnnnnnnnnnnnnnnnnnnnnnnnnnnnnnnnnnnnnnnnnnnnnnnnnnnnnnnnnnnnnnnnnnnnnnnnnnnnnnnnnnnnnnnnnnnnnnnnnnnnnnnnnnnnnnnnnnnnnnnnnnnnnnnnnnnnnnnnnnnnnnnnnnnnnnnnnnnnnnnnnnnnnnnnnnnnnnnnnnnnnnnnnnnnnnnnnnnnnnnnnnnnnnnnnnnnnnnnnnnnnnnnnnnnnnnnnnnnnnnnnnnnnnnnnnnnnnnnnnnnnnnnnnnnnnnnnnnnnnnnnnnnnnnnnnnnnnnnnnnnnnnnnnnnnnnnnnnnnnnnnnnnnnnnnnnnnnnnnnnnnnnnnnnnnnnnnnnnnnnnnnnnnnnnnnnnnnnnnnnnnnnnnnnnnnnnnnnnnnnnnnnnnnnnnnnnnnnnnnnnnnnnnnnnnnnnnnnnnnnnnnnnnnnnnnnnnnnnnnnnnnnnnnnnnnnnnnnnnnnnnnnnnnnnnnnnnnnnnnnnnnnnnnnnnnnnnnnnnnnnnnnnnnnnnnnnnnnnnnnnnnnnnnnnnnnnnnnnnnnnnnnnnnnnnnnnnnnnnnnnnnnnnnnnnnnnnnnnnnnnnnnnnnnnnnnnnnnnnnnnnnnnnnnnnnnnnnnnnnnnnnnnnnnnnnnnnnnnnnnnnnnnnnnnnnnnnnnnnnnnnnnnnnnnnnnnnnnnnnnnnnnnnnnnnnnnnnnnnnnnnnnnnnnnnnnnnnnnnnnnnnnnnnnnnnnnnnnnnnnnnnnnnnnnnnnnnnnnnnnnnnnnnnnnnnnnnnnnnnnnnnnnnnnnnnnnnnnnnnnnnnnnnnnnnnnnnnnnnnnnnnnnnnnnnnnnnnnnnnnnnnnnnnnnnnnnnnnnnnnnnnnnnnnnnnnnnnnnnnnnnnnnnnnnnnnnnnnnnnnnnnnnnnnnnnnnnnnnnnnnnnnnnnnnnnnnnnnnnnnnnnnnnnnnnnnnnnnnnnnnnnnnnnnnnnnnnnnnnnnnnnnnnnnnnnnnnnnnnnnnnnnnnnnnnnnnnnnnnnnnnnnnnnnnnnnnnnnnnnnnnnnnnnnnnnnnnnnnnnnnnnnnnnnnnnnnnnnnnnnnnnnnnnnnnnnnnnnnnnnnnnnnnnnnnnnnnnnnnnnnnnnnnnnnnnnnnnnnnnnnnnnnnnnnnnnnnnnnnnnnnnnnnnnnnnnnnnnnnnnnnnnnnnnnnnnnnnnnnnnnnnnnnnnnnnnnnnnnnnnnnnnnnnnnnnnnnnnnnnnnnnnnnnnnnnnnnnnnnnnnnnnnnnnnnnnnnnnnnnnnnnnnnnnnnnnnnnnnnnnnnnnnnnnnnnnnnnnnnnnnnnnnnnnnnnnnnnnnnnnnnnnnnnnnnnnnnnnnnnnnnnnnnnnnnnnnnnnnnnnnnnnnnnnnnnnnnnnnnnnnnnnnnnnnnnnnnnnnnnnnnnnnnnnnnnnnnnnnnnnnnnnnnnnnnnnnnnnnnnnnnnnnnnnnnnnnnnnnnnnnnnnnnnnnnnnnnnnnnnnnnnnnnnnnnnnnnnnnnnnnnnnnnnnnnnnnnnnnnnnnnnnnnnnnnnnnnnnnnnnnnnnnnnnnnnnnnnnnnnnnnnnnnnnnnnnnnnnnnnnnnnnnnnnnnnnnnnnnnnnnnnnnnnnnnnnnnnnnnnnnnnnnnnnnnnnnnnnnnnnnnnnnnnnnnnnnnnnnnnnnnnnnnnnnnnnnnnnnnnnnnnnnnnnnnnnnnnnnnnnnnnnnnnnnnnnnnnnnnnnnnnnnnnnnnnnnnnnnnnnnnnnnnnnnnnnnnnnnnnnnnnnnnnnnnnnnnnnnnnnnnnnnnnnnnnnnnnnnnnnnnnnnnnnnnnnnnnnnnnnnnnnnnnnnnnnnnnnnnnnnnnnnnnnnnnnnnnnnnnnnnnnnnnnnnnnnnnnnnnnnnnnnnnnnnnnnnnnnnnnnnnnnnnnnnnnnnnnnnnnnnnnnnnnnnnnnnnnnnnnnnnnnnnnnnnnnnnnnnnnnnnnnnnnnnnnnnnnnnnnnnnnnnnnnnnnnnnnnnnnnnnnnnnnnnnnnnnnnnnnnnnnnnnnnnnnnnnnnnnnnnnnnnnnnnnnnnnnnnnnnnnnnnnnnnnnnnnnnnnnnnnnnnnnnnnnnnnnnnnnnnnnnnnnnnnnnnnnnnnnnnnnnnnnnnnnnnnnnnnnnnnnnnnnnnnnnnnnnnnnnnnnnnnnnnnnnnnnnnnnnnnnnnnnnnnnnnnnnnnnnnnnnnnnnnnnnnnnnnnnnnnnnnnnnnnnnnnnnnnnnnnnnnnnnnnnnnnnnnnnnnnnnnnnnnnnnnnnnnnnnnnnnnnnnnnnnnnnnnnnnnnnnnnnnnnnnnnnnnnnnnnnnnnnnnnnnnnnnnnnnnnnnnnnnnnnnnnnnnnnnnnnnnnnnnnnnnnnnnnnnnnnnnnnnnnnnnnnnnnnnnnnnnnnnnnnnnnnnnnnnnnnnnnnnnnnnnnnnnnnnnnnnnnnnnnnnnnnnnnnnnnnnnnnnnnnnnnnnnnnnnnnnnnnnnnnnnnnnnnnnnnnnnnnnnnnnnnnnnnnnnnnnnnnnnnnnnnnnnnnnnnnnnnnnnnnnnnnnnnnnnnnnnnnnnnnnnnnnnnnnnnnnnnnnnnnnnnnnnnnnnnnnnnnnnnnnnnnnnnnnnnnnnnnnnnnnnnnnnnnnnnnnnnnnnnnnnnnnnnnnnnnnnnnnnnnnnnnnnnnnnnnnnnnnnnnnnnnnnnnnnnnnnnnnnnnnnnnnnnnnnnnnnnnnnnnnnnnnnnnnnnnnnnnnnnnnnnnnnnnnnnnnnnnnnnnnnnnnnnnnnnnnnnnnnnnnnnnnnnnnnnnnnnnnnnnnnnnnnnnnnnnnnnnnnnnnnnnnnnnnnnnnnnnnnnnnnnnnnnnnnnnnnnnnnnnnnnnnnnnnnnnnnnnnnnnnnnnnnnnnnnnnnnnnnnnnnnnnnnnnnnnnnnnnnnnnnnnnnnnnnnnnnnnnnnnnnnnnnnnnnnnnnnnnnnnnnnnnnnnnnnnnnnnnnnnnnnnnnnnnnnnnnnnnnnnnnnnnnnnnnnnnnnnnnnnnnnnnnnnnnnnnnnnnnnnnnnnnnnnnnnnnnnnnnnnnnnnnnnnnnnnnnnnnnnnnnnnnnnnnnnnnnnnnnnnnnnnnnnnnnnnnnnnnnnnnnnnnnnnnnnnnnnnnnnnnnnnnnnnnnnnnnnnnnnnnnnnnnnnnnnnnnnnnnnnnnnnnnnnnnnnnnnnnnnnnnnnnnnnnnnnnnnnnnnnnnnnnnnnnnnnnnnnnnnnnnnnnnnnnnnnnnnnnnnnnnnnnnnnnnnnnnnnnnnnnnnnnnnnnnnnnnnnnnnnnnnnnnnnnnnnnnnnnnnnnnnnnnnnnnnnnnnnnnnnnnnnnnnnnnnnnnnnnnnnnnnnnnnnnnnnnnnnnnnnnnnnnnnnnnnnnnnnnnnnnnnnnnnnnnnnnnnnnnnnnnnnnnnnnnnnnnnnnnnnnnnnnnnnnnnnnnnnnnnnnnnnnnnnnnnnnnnnnnnnnnnnnnnnnnnnnnnnnnnnnnnnnnnnnnnnnnnnnnnnnnnnnnnnnnnnnnnnnnnnnnnnnnnnnnnnnnnnnnnnnnnnnnnnnnnnnnnnnnnnnnnnnnnnnnnnnnnnnnnnnnnnnnnnnnnnnnnnnnnnnnnnnnnnnnnnnnnnnnnnnnnnnnnnnnnnnnnnnnnnnnnnnnnnnnnnnnnnnnnnnnnnnnnnnnnnnnnnnnnnnnnnnnnnnnnnnnnnnnnnnnnnnnnnnnnnnnnnnnnnnnnnnnnnnnnnnnnnnnnnnnnnnnnnnnnnnnnnnnnnnnnnnnnnnnnnnnnnnnnnnnnnnnnnnnnnnnnnnnnnnnnnnnnnnnnnnnnnnnnnnnnnnnnnnnnnnnnnnnnnnnnnnnnnnnnnnnnnnnnnnnnnnnnnnnnnnnnnnnnnnnnnnnnnnnnnnnnnnnnnnnnnnnnnnnnnnnnnnnnnnnnnnnnnnnnnnnnnnnnnnnnnnnnnnnnnnnnnnnnnnnnnnnnnnnnnnnnnnnnnnnnnnnnnnnnnnnnnnnnnnnnnnnnnnnnnnnnnnnnnnnnnnnnnnnnnnnnnnnnnnnnnnnnnnnnnnnnnnnnnnnnnnnnnnnnnnnnnnnnnnnnnnnnnnnnnnnnnnnnnnnnnnnnnnnnnnnnnnnnnnnnnnnnnnnnnnnnnnnnnnnnnnnnnnnnnnnnnnnnnnnnnnnnnnnnnnnnnnnnnnnnnnnnnnnnnnnnnnnnnnnnnnnnnnnnnnnnnnnnnnnnnnnnnnnnnnnnnnnnnnnnnnnnnnnnnnnnnnnnnnnnnnnnnnnnnnnnnnnnnnnnnnnnnnnnnnnnnnnnnnnnnnnnnnnnnnnnnnnnnnnnnnnnnnnnnnnnnnnnnnnnnnnnnnnnnnnnnnnnnnnnnnnnnnnnnnnnnnnnnnnnnnnnnnnnnnnnnnnnnnnnnnnnnnnnnnnnnnnnnnnnnnnnnnnnnnnnnnnnnnnnnnnnnnnnnnnnnnnnnnnnnnnnnnnnnnnnnnnnnnnnnnnnnnnnnnnnnnnnnnnnnnnnnnnnnnnnnnnnnnnnnnnnnnnnnnnnnnnnnnnnnnnnnnnnnnnnnnnnnnnnnnnnnnnnnnnnnnnnnnnnnnnnnnnnnnnnnnnnnnnnnnnnnnnnnnnnnnnnnnnnnnnnnnnnnnnnnnnnnnnnnnnnnnnnnnnnnnnnnnnnnnnnnnnnnnnnnnnnnnnnnnnnnnnnnnnnnnnnnnnnnnnnnnnnnnnnnnnnnnnnnnnnnnnnnnnnnnnnnnnnnnnnnnnnnnnnnnnnnnnnnnnnnnnnnnnnnnnnnnnnnnnnnnnnnnnnnnnnnnnnnnnnnnnnnnnnnnnnnnnnnnnnnnnnnnnnnnnnnnnnnnnnnnnnnnnnnnnnnnnnnnnnnnnnnnnnnnnnnnnnnnnnnnnnnnnnnnnnnnnnnnnnnnnnnnnnnnnnnnnnnnnnnnnnnnnnnnnnnnnnnnnnnnnnnnnnnnnnnnnnnnnnnnnnnnnnnnnnnnnnnnnnnnnnnnnnnnnnnnnnnnnnnnnnnnnnnnnnnnnnnnnnnnnnnnnnnnnnnnnnnnnnnnnnnnnnnnnnnnnnnnnnnnnnnnnnnnnnnnnnnnnnnnnnnnnnnnnnnnnnnnnnnnnnnnnnnnnnnnnnnnnnnnnnnnnnnnnnnnnnnnnnnnnnnnnnnnnnnnnnnnnnnnnnnnnnnnnnnnnnnnnnnnnnnnnnnnnnnnnnnnnnnnnnnnnnnnnnnnnnnnnnnnnnnnnnnnnnnnnnnnnnnnnnnnnnnnnnnnnnnnnnnnnnnnnnnnnnnnnnnnnnnnnnnnnnnnnnnnnnnnnnnnnnnnnnnnnnnnnnnnnnnnnnnnnnnnnnnnnnnnnnnnnnnnnnnnnnnnnnnnnnnnnnnnnnnnnnnnnnnnnnnnnnnnnnnnnnnnnnnnnnnnnnnnnnnnnnnnnnnnnnnnnnnnnnnnnnnnnnnnnnnnnnnnnnnnnnnnnnnnnnnnnnnnnnnnnnnnnnnnnnnnnnnnnnnnnnnnnnnnnnnnnnnnnnnnnnnnnnnnnnnnnnnnnnnnnnnnnnnnnnnnnnnnnnnnnnnnnnnnnnnnnnnnnnnnnnnnnnnnnnnnnnnnnnnnnnnnnnnnnnnnnnnnnnnnnnnnnnnnnnnnnnnnnnnnnnnnnnnnnnnnnnnnnnnnnnnnnnnnnnnnnnnnnnnnnnnnnnnnnnnnnnnnnnnnnnnnnnnnnnnnnnnnnnnnnnnnnnnnnnnnnnnnnnnnnnnnnnnnnnnnnnnnnnnnnnnnnnnnnnnnnnnnnnnnnnnnnnnnnnnnnnnnnnnnnnnnnnnnnnnnnnnnnnnnnnnnnnnnnnnnnnnnnnnnnnnnnnnnnnnnnnnnnnnnnnnnnnnnnnnnnnnnnnnnnnnnnnnnnnnnnnnnnnnnnnnnnnnnnnnnnnnnnnnnnnnnnnnnnnnnnnnnnnnnnnnnnnnnnnnnnnnnnnnnnnnnnnnnnnnnnnnnnnnnnnnnnnnnnnnnnnnnnnnnnnnnnnnnnnnnnnnnnnnnnnnnnnnnnnnnnnnnnnnnnnnnnnnnnnnnnnnnnnnnnnnnnnnnnnnnnnnnnnnnnnnnnnnnnnnnnnnnnnnnnnnnnnnnnnnnnnnnnnnnnnnnnnnnnnnnnnnnnnnnnnnnnnnnnnnnnnnnnnnnnnnnnnnnnnnnnnnnnnnnnnnnnnnnnnnnnnnnnnnnnnnnnnnnnnnnnnnnnnnnnnnnnnnnnnnnnnnnnnnnnnnnnnnnnnnnnnnnnnnnnnnnnnnnnnnnnnnnnnnnnnnnnnnnnnnnnnnnnnnnnnnnnnnnnnnnnnnnnnnnnnnnnnnnnnnnnnnnnnnnnnnnnnnnnnnnnnnnnnnnntaaatttaaagcgattctaggcttataactaatagaaaaacggtggtaaggtaaatgtatatatagtagaaaaatctcaatcaattctctaactctttaaaaataataatagtccagaaaatataacaatctaatagataacttagtaatcaaataaataaaacaaaatgaaaggatgtttttcgggcagaaaaccagcctagtcagtcacatgacccaactgtatcagggatgaaaaatgacagtattcatcctagattctgatagaaactaatagctacttctctaaagaaacagtatataaggataatatataggttataggttatataattaaaggaggctatataggtagtatatacagctcctacctagtccctagtcccctacgtaccttaatagatataatacctcaggtatcagccttcttagtactagggtcctaacaataggccgggctgggtcaggttaaaacaggctttagagaagtctagttataagcgagtaggcatatgaaagaggaagcgaaaaacatatagaaagtaagaagtatatgaagaagagagaaaatcaggatatagagcgaaaacgcgatatatacccgttatagacgaattcccactggctcgttttgtagggcggtatatactatatatgaaggcggtatacaggtagggctttagggggtgttgaaacttatgaacagtcactgtacggtttggatttaacggatatatggagatctcgaaacctaagtattatttatacgagtgatctcgccggcttacggccatcgagatagtcgttgccgagcaaagcgactgattctaacttctaatgctgcgcaaagcccccctcttactggcttattggtttcacagcgacccctcggctagagcaactcccctgcttttatcataattctaggagaaaacctggccacgtgaaatgtacgtaagaccttctgatttatacttgcttcgcttcaggagcatcccggagaattgaacaacggtaggcgggccgttcagtgtacgaatagggaatggacgcgttcatagagaggctgccccgtgtggctgataaatgataatgcaagttacaagagcggctctgcgatcgcgtgtcggtgtatgatgacatcactctatttatggataacgaaacagtttaggcgcctagcgcaggcagccattcaactacaacatatgactcaactttagacctcgggaaagaacatagatgagtcagatccaagttaccctataaatggaagtactcaagaaaggaagttatactttatgaaaagcgagcgcaaaagcaagaacagtatagcatgtaagaggcaagagggcaagaaggcaagaaagcaagaaatcaaagataaggatctacaccaatagatcacatggtacagggggggtcaacgctcgaaaatgattggctgacccctcctgcggctgatcctattaggtgattgcccgcatgggatgttgtcacatgtgaccggacttaggcaggaaaatcaggtcacattaaatccgaaagttaccgtaaccttacacaggctactagtagagattgggcatatctacaaaaccatgctggtaaatagatatcaacatcgagtaccggagaccaaccaaaaataccatggtatggtatcacccgagtacccaaatgatgagatcagctggtccttgccaaatgacgcccaagcacaatctttcccctccctcagatccccttttgcgctctgatgccctcccaactaaaccattttacagtgagtccattggtctcatgagtccctcccctggagaaactcggaatctccgttaagcgccaccccgcagtttatcatcacaccctcagccccatcccaactgactcacagttcgctttcaatattcccttcaacctgccctcccttttcttcttcctttcccccttacccttctcattttccatttggtccattctcgctcgatggactattaccctattcatcaaattgactcattcggccattggagccttaaccccgagacttaggtcatattggcttatcgccacctgagagagacaaagaggcagaccctgacaaatcacctgttttgcctggtgattcaacttccattgagttccataaacactcgctcatcagctttcgccatccatcttctcactctgcctggtgtattcatcccctcccctcctctttccagaaaacctagccctggacaccattgacacaccattgactactttaacctcttattaccaattaccgttggctcaacggtatttaatctggaatgacttcgtccgctggctggaaaccagccgaccagccgaccactatgcatcgtctcccatccgtttctagccttatgtcacccccagagaccaagcctctcgagagctttcctgtctcgctttcaccgtttgcaaagcctcgagattcttcaactcgtgacatacagcttccacccatctcagatgatcgaaaacggacccagtcagagatggacctcccgtcgccacctgtgactccgtacaccgggaacaagaagagcaatcccaacgcctcggaccagattgaaagggatttgggatcccccagggaccctgtccttttcccccctcaggattccggtactgacgttgctacggatgagccactgttcggccccgttcaccctccatctgcagaggcacttgtggaagagcacatgaattctcatatggcaatctttcgcaataagttgaacaaacccacacgggatgaatatctccttgcgctttcctgtgtccctattgtttcgactcagtacaatcgcaacccgggtgcttgggcccgagaggaacgcgagacgttggagcgccaaatggccatgatgaaccgttatcgatcaggagattacgagcccaagttgaagaagattgctcctgctccggtgaaaagactaggaacccaaccgcgcgtgcagcgaactcgggtcaaacgcacccctaaatccacacccaagcagcaggtgtttgataactttgaacccccccaaaccccgcttaccaaaccgcgtaccttgggtacgaatcgcgatgacaccgattatcactcactcaaggactactcgcccccggcagagacgctaggcagtaatgccaaagcattgaaggctgattggaaggggcagatgttagatttgagcaatgacccggacagaaatattctcagtcccgccgagctcaatctcgcatctaccctgagactttcatgtgcgacctatctatgcagcaaacgtcgaatttttgaagctcgagttcgagctctcggtgtgggcaaagagttccgtaagacggatgcccagcaggcttgcaagatcgatgtcaataaagccagcaaactttggaccgcctacgaacgcgtgggttggtttagagctgaatattttcataaatacctagcatgatattgcaggttacgtgtcttgatggtactgtggataattctgccagttcatcacagcccgtgtgtcgcctcccatcacaggctaggcactaactgaccttctacctcaagtgtctatcactggcagtacagccctcgactattaatccatatttgagtgctctcggctatctacacctgaccaagacaaacacccaagtgttccctagaatcaacccaccttatctcttggcctgtcgatttccttttcaattgctatctcgcttttacgactcatcatgacacattcttttcttttgagattccccccttgttggttttcttttcgttttgcatacaggccccatggctttgattatttccaactttggctgctggcgtttgggtgcttcacttcagtttcgctttggtctagaatggcaggcttggttacccacgggtgttttcttttcactattgcgattgaattttactgcttggtcgtttccttttctttcttcctttttcctcgtctttgttttggaaaggcagcaatagcacataggataaggcttgataccctgaccggatatggttttcctatattacaatgaattgatatgaaattgagcttaagatacaattcacaaaaaagatacatactagttaatatatctatcatctgtagttgacatgcccaattgatatgtttctaatttaaaccgaaataaagcggtggggcgcaatcgtaatcctccggcagcccggcgccaccttttttttgacgtatcccttgtatcatcttttgcttcactccaatctggatcatcaatttccctctttgaaataaccttagtcaaaagtaatgtctcagcaagtgactcgttctgggtccatcgaggaacaggaacgcgcaagggaggagggcgacaagaagccaaagtctcgccgaccagccagtaggtcctgggatctcatcaaccctctgtccacaactaactgtaccagatactgctttccgccagcaaagattgaaagcgtggcagtgagcttgagatttccgtatatctgcctatggagcaccatgctaacatctcactaggccaatcttaacccctaaaagcgttctacctctgtttttcatcgttggcattatctttgccccgattggcggtgttcttctctgggcaagctctctagtatgcttcgttttatacctttgcgtccttggcagaacagctctgacgagctacgtgctctaggtccaagaaatttccatcgattactccgagtgctccagcaaagcaccgaccgacagctatgcctccgttcctcattattccgcgaccttcaaatcttctacagcaatatcggcacccacctggcgaaagtccatcaatgagtcttcgggcaccgttacttgcactcttctttttgagatcccgaacgagcttccagcaccagttttcatgtattaccgcctcactaacttctatcaaaaccaccgccgatatgttcagtcgctcgatttgaatcagcttatcggagatgctgtctcctacaatacggtcaagggtggcgtatgtgacccattagcggtcaacaccacggctcagaaggtatactatccatgtggactgattgcgaactcattcttcaacgacactattgggaagccccaaatcctaaacccgaatgcacctgagaatgataaacaattctatgaaatgaccactaagggcattgcgtgggcgagtgataaggaactcatcaaaccgacaaagtacagtatggatgatgtactgccaccaccaaattggctttgggccagcgagaacggtgtctataaagaggatcccaacttacatgaaaatgaagctttcatggtttggatgaggaccgctggcttgccatcgttcagcaagctttcccgccgtaacgatacccatggcatgcctgctgcaagatattccattgacattgttgatcgtatgtgttaatactgccgcttacccatatcttactaaaattttcaggtttcaatgtcaccgaatacgatggaaccaagtcgatcttgatctccactcgaacagtgcttgggggcaagaaccccttcatgggaatcgcctatgtggttgttggtggaatctgcgttgttctcggggctttgtttactctcgcacatttggtgcgtccgaggtatgatctcctttctttgtgggcagaaactccaaactcctaacctacttactagaaaacttggcgaccacacctatcttacttgggactcaaatcagccgagcactgctatcgccacgggacgggataatgccccttgaaccccatcttcctgctctttgttcggcgttttttttttttttttttctgtttctgtttcaatatgccctgtaaataacccctgtgtttaatgacctcatcctcaactttctgacataccaatcgtttcattttcttgaatcctacgtgctcctagcccttgctcaagacatgcattcctcgcgagacacagcattcctgatgggatctggcaggctatatggtacccgcgaaccggtcggtcttgagattgatggttctttttttgactctttatccactccttctgtttttctcttttggaacaggtgtaaaaggggagttcaaaaccagggtttcttaacatcatggtgtgtcactcatttttccaactcgtcatcttcatcaccgttttcctgcaggcttggtgtagcccctttgcactccagaaaagaggcgcctgtgctaccgaagaccccggtgcaaatttcttgcatgaagtaaggcgcctccaatcggatgaagccgatcttgctatttcgcaggccaggaaggccccgatcgagatcgagacctggttccatatcatcagcagcaagtcggagtccacccaggtcactgataatatgatcaattctcaagtcagttgcttcttttctcgactggcatctcagtgctaattatttacctacagttttctattctacaacaatcttatgcagattctggcatctcctaccgattgcaaggtgtgactcgtaatgtcaatgataagtgggcgagcaatgcggatgatacggccatgaaaacgactctccgaaagggaagctaccgaacattgaacgtttacttccaaaccgatctgcaggcctcacccgaacaagcgggacgtgctttcgggcacaggggtgcagtcaccaacaatgatctggcatcaagcgttcttggattctgcactttgcccgatccgagtgtcaatgctagtagcccggcttctcaatatatcaaggatggctgcaatgttttggccaaaacaatgcctggtggctccttggatctgtacaatcgaggcgggactgccatccacgagattggacactggaatggccttttgcacaccttccagggggaatcttgctcagtagataatcctggtgaccacataagtgacacgccacagcagtccaccccgacagatgggtgccctgaccagaaggattcttgtccagactcccctggattggacgcggtccacgacttcatggattattcatccgatgtatgttatgagcgcttcacgcccggacaaggagagcgcatgcggagtatgtggatatccatgcgtgaaggtaaatagcgcaacagtgacgggcaataaggccaatacaagctctgtatggagtccattcgcagccatacatgtacacgcagaagccagccggccaggctagttggttacgattcagagaaataatacctgtctaatgagctgttggacgaatttcatgtatgaatatttggctacagtacagttgagaggcgttaagagactagtttcctcccaattaacaccataaatgtgtcttattctgatcccatccaccgtgggcccgagtcaaatcgtacaagtattcgaaaggcaatcaagagatgcaaggcattcgtagcccaacttggcttgcccatagattggaacatggagtacaagaaagggagggaagaaaaagtcattttgatgccccagcggcaaaaaaatggtcgattaccgcttgcgcttgatcccgcggtcattgtcttcatggtcggcctccttgtctttacgtttcgccttttcctcaagggcgtcccagtcctcaccactttcctcgtcgccactgaagtcttcttcgctggcatcggcactcgcgtcgtcatcaaattcgctgtcttcctcagaactctcgtccccagctgcaagctctgaatctgacaactcgaaagccgactcctcttcctcgtctgacccgttctcagagtctgattcggccgataagaaagaccatccaccatcggcaaagaagccgtatggatcgctgacaactgttttcataatcgtggtccaattcaggttgagcggaccctcggtgaacgcaatatcaacagaatcaagccagtccttaacaccctcaagtgcctcaacaggaatcgtgttgatatgaacgggagtccggcggaaatccttaaagacgaagaccatgtcgaagtttttgagtccaaactgcacagattagtaaaccaggctgatgaaatagtagaagtggtaatcattacctgaactctctccagatgggctatttcgatttcattcaatgtgacggtcgtgaaaggaggttcagtgagctgaactagggcatctgtggtgggttgaatcaagacattagaccggtttggaacgccggtaaagccaatttccctgaatgggatatcgacatcgacgccctcgtccttgccagcgtccgcaaccttctcggcaaatgccttgaactcgcggtccaatgcagctctccgccgtctttcctcctgttcagcctcaaattcttcctcatctccgtagcgatgtttgcgccgacggtttccagtttcatcaaattgcatttccgtggcctcgcgatagaattgaatatcctttgtcttccgctttccaatcatgatgggcgtcttgagatgcacatggataagaacgatcaattcatgggcacatggttggaagaacagatgcttcacattgctgaagagcacatcgacatgctcattgcggaaaggcgataggtaccggagaccattctgatgaatttcgacttctcccggaacacgcttcccatccaaaggaggccggagatagacgtcagggagtttcactggacgtcggtttctaatttcaaccagtttatcctgctcaacaacatcctccaattccttcttctcctgctctcgtctcagggccgtcttgcgaagttcggtgatatcctgggcaactcgtgcaagccggtcgttatccttggatcggagggtgagattgcgaacaaaatgagctgataggtcctcaaagggctggtcatcctttcggcccacaccctgacctggagacaggaagttgattcgtaggtaggcgtattccccttcgtcgcttttgctggcgttctttatggtgttgatatggaagggaactggtcggcccatgataggcacaatcacggttgaagtcttcaggtcgacgtaaactgtaaggtctttgaccttggcggggagttggttgtctcgcttgtaagactcaaagcgcttgaatttcttctgtgccaccccattatcgtctcccgtagtaccggtgaaccgatccaaaccttcctttgtcttcttcaaagccagctctttttggtgttcacgacgacgggcttcagctccctcattgacctgagttggtctttcagcacgaagtttggttcttgtgacgtttctgccagcagttgcgctagatttcgtctcctttttctctttaacaggcttctctggctcttcctcatccccgaagtagaatgagatcgagtccatgtcaataccggcgtctttggtaaaaatatgaggcccattttcgccgacacgaaccgtatcggtgatgaccatggaatatgcaccattcttggcattcttggagtctggatccttaacatcagtaagcccgatcgtgatagacagtgtcatgccgttcttcaagacgcggttgttcttggcattgaggaccatattagcatcccgcagctcgattccaatccctgcgccaacgttcttaacaaagtgtccctccagctccggcttcttagaccggacgagactcagtgctttgttgtaaacgtccttggcgaccacaccatctcgaacctctttcatggttgcttcatggaggctaagcagtagggcatagttcgcttcttgtgattttgttgggtcaaccagatatgtgcgcccaataagcgaactgtaggtcttgtatctgattccaaagctggacaaaatgataccgggctcgaggtttttattgtcgggagtcgctgtgagcttgagatcgtaggcacctccactttgaattacaggtccgtaggcccagtcaatttgctgggaatcgaattccgagggcagccgcgccagcttgttgaaaaatttcccatcatcaatctttgcatcaacctttgcggcgagggctttatgtgtcatcttcttttcctcgtcgagcaaacgtgacatctcatcgacgaagtactctgacataaggccactacaagctctggaagcattgcggattgagaccttttttgagactgtgtcagcaagcaccacccgtgaaacgcactgacatagaaaaactaaccaattcatcagaatctttgatcgcaaaagcagctgagagtgcaggtgctatgtcaacttcctccacctctttcgatatttctgcgaatgtgcgcttccattcatctgcgaagggtcctgaagctgtatttttgggtaaggtgccgactttattctgtagttattgcggttagagtaaggcaaatcgaaccggtgatttaaatgtcattttagctcacccctgcgcccttgataacatccaagcatttctcaaatgctttggtctttgattctgggtctttggtagtgaccagaatctccacgggaatctttccttcttttagcggctcaaggtgtttcgcttaaatttgatttaattagctatgtggcgcgcagaagtccatgtgttgataatcacctttcttggctgtggtgaccacgtaaatcgcctcagttgtgagaacaaatagtgtcgcagggaattcatacccgagaagccagaactaatcacgagttcataagtaacgatgttatgaagctcacgggccactgtgggacacggatagaaattttggaggtgattcacatacatgcatcgcgttgttcttctggaatgagttctcctcatcagtcttacccatcagaatgactatggaccctgcattgccaaatagggcattgcccgagcgcttgtcggccttccatgacgcatagaaactagacaggcggttgaaaaagttgttattgtcaatggcaatctcctcggccatggtgatggtctgatgtgagcaagatatgccacagtcagagactaagttgatggcaagagagcttggtggagaagcgcaggagctgttgtaggtatgtccgagtgctgaatttgttgaggatgaaggagagggaattaaggtagcatcaatgcgaccactgcgatgatgatagaccagacaccaatagaactaggttgtggaagaaaagacaaagacagaaagggacggcttaggggaaagtgaacgcgaaaagcgcgttcctgcactctaggtctctctatattaccgtatcaaagtattaccactttcatactagcgctgttttcatgtctctcgaatccgaacatgttttatgaatatctcttctcactgactttctttctatcttcaactttcaagttaacatggcgtatgtgagccttcacttggtcgtctaattagataacaaacaccctgtgatgctgccctcttttcccgcccacatcgcctgcgctttggaattcactatcgacattgagccagtctctctttgacaagcacccttttctacgatgtacactggctttttagttgtctgtaaacaatgaactctccgatagctcccatcctcctcgagcctcacctcggcgaacttcctggaagttcgcggagggtttttcgcaacgcagcnnnnnnnnnnnnnnnnnnnnnnnnnnnnnnnnnnnnnnnnnncatcctcctcgagcctcccctcggcgaacttcctggaagttcgcgaaggatttctcgcaacgatgcagctaccggagcatctgccgccggcgttcgcgctctcagtgcacagatggtggccttttacttcagagcaccgatcaaagctttctttcgtatgcgtgttgagtatgtagtatctatggacctgaagatctttgtattgacaatatttcacctagttatatggtaagaaacacgaccaacccatcaccagccttggttgcttatcatttgaaataggcatttgcgagagctgtgaacccacgtgtcgccgaaggcaaatggtctctgcatacgacaaccccgggattattgctccacgccgttcggacatatggctggcggtttatcccgaaccaagtgcttccaccattgatggcaaatgcagggtgacatataccagaggatatggccccaggtgattcaaaaacgctaacgatatagatcagggttggtgccgttctctacacgtcctatctccaagttttgggggccctacatgaacctgtgtcccaaggggtgaagcgagtatggcccccggctcctccatctgcaacattcgcagctggattcatagccggcacaattcagtcgattgtagccgcccctctggatgccttacaagttcgctttcaaaccaatgacatgctggagggtcagtaccggagtatgtggcattatggtcaccataagctcaaacagattggtctccgtggggtctttgcgggctggagcctgtcgttcatgcgggattcactcggctatgctgtgttcttctccacgttcgaatacatcaagtcacagtcctactattcattcgtcacttggtactatggctccctgcaagtcgatcatgtgggcatgctttcatcgtccaggtctagtgatcgtggtgtgccactcatcaagccccactatgcattggagccatgtttcctgctgatggccggtgttgtggcatcggtcgctcagcaaaccattcagcatcctataagtaggattcaagaccttcaccttggtcgtctggaatatctggatcaccaggccagcttcataccctcgcgacagaagatgatacaattctactaccatgcctatcaagagaccttcaagaggtgcgagcggaaggttgcgcgggccgggggctggcgctcctggttgttccgtggatttgtcgggagctctcttcgccaagtacctagcactagtgctggcctgatcatttttgaattggtgcgccgacggtacgcgaatcccgcagacgctgtccatattcagagtgatggatatgatatccttctcacttaatggcttatatgacaggtttttttccccctcgcgtcttttctgtttgttgtttgaacttttttatccttggtcattccgaagagggcgttacagacatagaatatgatttcattagacgtatatacatttatgtacatacaagcgataccctacttcataaatatcttcctggtaataagtagttaacgtaattcacatacgagccgccaccacatacgacccgccaccccatccaaaaacgcgtccatgaattagcacctagttaattcaaccacccaccatgccaccaaaacgctctcaatcctctaaagattcaatagagaaagagggtaggatcttattagctatccaggcttttaagaatcaagaattttccaatatttctactaccgcccgcacttttaacgtaccgcgttcaacccttcgggaccgcctcagtggtatacaacaccgcgcgacaataatacgcgacttctcgcgccaacttgactaaattaaccgcaattgaagaggaatctcttcgaaaatggataatctctatggattcttgtggatcggccccccggccctctatagtacgagaaatggcagatcttcttcttaaataacgcggaactaccccagttattttagttagctaaaattaggttatatattttattaaacggtaccctacccttatatcccgattcttaagacgttataattataagtgcgcgaaatgtaaagacctaaggattattagagagtggtttaatctagtttaaaaaactattctttagtatagaatcgatctagataatatttataactttaacgagacaggttttactataggattaactataatagcaaaagttataactagaagtaaatactacagttagagattacttttataacctagaaatcgcgagtaggtaactataattaaatgtataaatgcggtagggtaggcgcttcctctatatatgatttttaaaggcaaagtctttattaaatcttagttnnnnnnnnnnnnnnnnnnnnnnnnnnnnnnnnnnnnnnnnnnnnnnnnnnnnnnnnnnnnnnnnnnnnnnnnnnnnnnnnnnnnnnnnnnnnnnnnnnnnnnnnnnnnnnnnnnnnnnnnnnnnnnnnnnnnnnnnnnnnnnnnnnnnnnnnnnnnnnnnnnnnnnnnnnnnnntatattaataaactcgactttcttaaagtataccctactatataaattaaagcttttaaatcggagataattaaaaatagcttcttagcagctggtttagtaccctttttacctaatcgggtactttcgaagctaaatatctagcttcgaatacctaccccccctctgagccagggtagtgacttaagccggaattttatactaaaaacccctgctaccaggaaagatctatatcgataggctttgtcaatcaatgctttactttgtatataatctcgaagcctaataagtccttctaaacgtgcattaaaccaacttatcaaaggctgccaagttataatgtataatactattctactagcgaaagaaaataaggagttacaggatgaaaatgagaagaagaagtaaaaacggacccgatctagaaggcagatacccgccgaagaaggcctctctgttcaagaagcatctgtattaattatacagtaacaagaagcaattgaagcacctccccccagccccggcatgcctagagaatcgactattcaaccatgtacgcgcccctcccgggggtgtggaatatgcagattgccagggcatagaagagaaacatgtccagatagaccacttagttagttgatttaatttaatggcgttatggttgagataaatgcatttaaaaactagattgttgaatggggtggcgggtcgtatgtggtggcggctcgtatgtgaattacgttagttacttagttagttaactaacttagttatatgtattagtaacctatttgtcgatctatcccggattagacgggacgatacgatctagtacgtattagtactagtacgtactccgtatgcgtacagatcatcttctactactctggactagttattaggatggcttattctctcttctctctttcatacttctatttgacgaaaattactattctaacctagctcctcggaaaacacttgatgaaaatcatctgaatccctctgtcctattctatatttgacgttttggccgtgtaatactctcacttttttgcccaaacgcaccccctctccccaaatctccgcctgaccgtcaccccatttcgacggtacttcgtcatcttgcgtcgcgtgtgactttacgtagctagtcgcccgtggccacatcgcctgagtggcgccctatcacggactaatatagtggcttccaaggttgtgcccaggtggtaccgttgctgactccttgcggagaacgtcttatcgatatcattaattccatccgactccgcattcttttctccgggacaaagggctgcgaggttcagcccgtcaatatcgccatcatttctccgacttctccctcacgcgcctctaacatacccctccagtccataccctctgattctcgctcgatccattcggccaaattattggagtctaacgagaagggtaatcgacggtcttcccattcgtctgctcgctcggtcgggtctgacgtctccatctggtcagataccggtgacctcgccgagcagttcgctgaggctgaagatccgctacagattcaccttctcaattcctcagactgccggctcttgcgtcaaaaagagcgaagggagcagcccaaacacgtccgctacccttcaaacttgaacaacgagcgttctggcgtcgatattgaaaagatcaaaataccagcccctcccccgcgacatatttcgagagttgaacgcgtgctggccgccataatgacacccagagatggaccaaacacccagatgcacggcttagtcggaaaaccattactgtgagtgtcttaaaaggccaataccgtaatttttaccactgactctggtttgcatgtagttacttcacgagtgtgtttgtatcactgggtgtctttctctttggctatgaccagggtgtaatgtctgggatcataacgttcgtgtctaatccctcgagcatagactcgccataaagataacgaggagcggaatgtggctaacagatacagtggctggtacttcaaagattacttcaaccagccttctcgggctacaattggcactgtggttgcagttctcgaaattggtgcattcatatcctcgctccttgtgggtcgtatcggtgatgtgatcggccgtcgaaggactatactctatggctccattgtgttctttgttggcggtgcttttcaaacattttccacgggtatacccatgatgatggtcggtcgtgtgattgccggtctaggcgttggtgccctctctactatcgtgccagtttaccagtctgaaatatcggtttgtactcccatttctccatcaatcctcaaggctttttctttgtctccctccccattctatcgccaggtacgctgacgaattttaagcctccccacaaccgtgggaagcttgcatgcatcgaattcaccggcaatattgctgggtatgcgactagtgtgtgggtagactatttctgtagcttcatcgataacgactactcctggcgcctgccgcttcttttccagtgtatcatgggtgccttacttggagttggcagtctgatgatctgtgaatcacctaggtgagtagaaatcccatccattgtctgctaaggctaactcccaatcctttccttaggtggcttcttgataatgaccacgacgaggagggtatggtggtgatcgcaaatctttatggcgaaggcgatctcctcaatgacaaggcccgtcaagaatatcgtgagatcaagatgaatgtccttgtccagcgacaagagggtgagcgatcctactcggacatgttccgccggtatcgcaaacgtgttttgattgctatgtcggcccaagctttagctcaactcaacgggatcaacgtaatctcatactatgcgcctctagtgtttgaatcggtatggacctagagtctccctccatggtgctatgccggatacaaataatattcaaaagggttcaggattatgctgaccaatctaccatataggccggttgggctggacgggatgccatcctgatgactggaatcaatggtatttcatacttgctgtctaccataccaccctggtatctcgtggatggctggggccggcgaccgattttactcacgggtgccgttgccatgctcatttcgctttctcttatctcctactttatttacatcgagattcccgccaccccaaccctgacggtgatcttcgttatgctctataatgcagctttcggggcatcctggggccccattccatggttatatcccccagagattttgcctttgagtattcgtgccaaaggtgcaagtttgagcaccgcttcaaattgggcattcaattggctcgtgggcgaggtaacacctgttcttcaagaagttatcaagtggcggctatacttggtccatgcattcttttgtgcatgcagttttgtgcttggtagggtccctcatccgtggtcatctactagggaccatcatactgactatcaccacagtctattttttgtaccccgaaacgagtggggttcgcctcgaagatatgaacgttctttttggcgatgcttccactgccatgccaacacccgccacccaaggcgaacgggggtcgctaatgggtgctggttcacccgtcccatcgctcgacctgcgtcggcagtatggtcaatttggggcagataattccatccctggcctagatattgatccgccgacttcaagccacgagggaactagcaaacgcggacgctcaaattctcaccagggcagtgtccgcggcgaaggaattggtggctggatctcaaacatggtcagtcgaaaccgaggagcgggcgccggtgctaccagcagtcaatatagacgtttggagcaaggagaaggcgaatgaaatatttacgggtaattgtggccttggactggatagaggaagcaagaaaagaccaaagaatccgatgttatatatctcctttccccatctaccaatgccttctgttgatctcgagttcacgttcacggtatatacctatcatacgaggctttgcattgatgttgttctggaattttcttgttacatatgtgtctgtgccaatgatttttatatatatataaataaaatatctagttataatacatgtactataaatgattggtatatttatagcacggagctagaattacaagggccaatgttctgaaaacggcccgctaaaagtggacttgtttatcctccctgaggccacggatctcactttctccttgattccctcagcccactctcttgtctcacttcacttcacttcacttcatttcatttcatttcgttttctttttctttttctttttcaatctacttctggcattgcttccggtttatccgctagatttgcccccattctatcactcacttacccaggggaatggctatgttctcttaaatctatctgtccttctattaccggtctacctcggtattccccagtttaatttcttactattctcgcattttgttggtacattttctttcgaaaattctacaagacacacacacacacactatggtgggcctagacactgccgtgagcacgggtgccaaccatgagtccgacctccgtcgaagaaatgtccctgatattagcaaagttcatctggactccaatcggacgaatgacgaagatgtgaagaaagctagaacacaggtgaggtagccttcttgaacatcatcatccacgcccttctaacctcccctgaacagtcaccctcgttcctccatgtgctagctaactgggagccgatcattgctcccatcctcttgactgccctcgcactcttcacccgcctgtaccagatcggccgttccaacattgttacctgggacgaggcccacttcggtaaattcggttcccactatctcaaacgcgaattctacttcgatgtccacccgcctttggggaagatgctagttggcctatccggatatcttgctggctataatgggtcttttgaattcaagtctggcgagaagtatccagaagatgtgaattatacctttatgcgggccttcaatgctgcctttggtataatctgcattcccctggcctactacactgcgcgagagttgaacttccgtcggcccacagtctggctgatcagcctgatggtgctgtgtgagaattcctatgcaacaatttctcggtttatacttctcgactcgatgctgctctgcttcacatttactacgacgatgtgctgggcaagatttcaccggttgcagcgtgatagcttttcgctagaatggtatgcctggctctgtttaaccggtttgagcattgggtgtgtctgtagtgtcaaatgggtcggtttcttttgcactgctcttgtcggtctctatactattgatgacctgtggaataaatttggcgacctaaagatgccacgggtgagtacctgctatcagccccccttgcctagaaggtgatcaccgattagctggctaatgcggacgtgtttggacaggctgtactcgcaaagcacttggttgctcgtgttgtcggattgattgttattccgatcttggtctacatgttttctttttatctgcacttcttagtgctggcgaacagtggtccaggtgatgcccagatgagctcgctttttcaagccaacctacaaggcactgaagttggtagagatagccctcttgaactcgcaattgggtcgcgtgtcacacttaaaaatatgggatacggaggagggcttctgcactctcacgttcaaacttacccggagggatctatgcagcagcaggtcacctgctaccaccacaaagatgccaataatgactggttcatctaccccaatcgacaggagccggactacgatgccactgctgatctgcggttcgttggtgatggcgatgtcattcggttgattcacggacagacaggtcgtaacctgcattcccatgctatcccagcaccaatcaccaaatcacaccacgaagtgtcatcttacggaaatatcaccatcggagacgacaaagaccactggaaagtggaggtagtcgatgatgttgcatcttgggaccgatctaggatccggacactcacaacagcattccgactccgccaccctgtcctgggctgctatctacgggcaggaaatgtcaatctacctcaatggggcttcaagcagattgaaacaacgtgtaccaaggaaaacaaacccggcgatgtgtatactcactggaatgttgagtctcacaccaacgaccgttgtaagcttatccttttgccaaacacttgatattgatgagcccaatcagacttattgacctatccacagtgccccctggtgaccctggctcctataaatcgcccttcttgaaggacttcatccacctgaatgtggccatgatgacctctaacaatgctctggttcccgatcctgacaagcaagatgacttggcttccaagttttggcagtggccgattctcaatgtcggcttgcgcatgtgttcttgggatgatagcgttgtcaaatactatctgctaggaaaccccctagtctattggggaagcactgccgctcttggtggatttggtcttcttttcatttggtaccttctgcgctggcagagggggtacaatgatctcagcaacgaggaaattagtcacatccactactctggcatatacccagttatcggatgggtcttgcactatcttccctttatcatcatggcccgcgtcacttatgtccatcattactatccggctctctactatgccatcctgaacttcggcttctgcgttgattgggtaacacgcaagatgaaccccagattgtctgcagcggtgtatgctttcctctacgtggttattgtcggattgttcattcatttccgagccatcgtgtttggaatggagggttctaaccagcaatggagtcatctccgctggctacccggatggaaaatggcgaatgtgaactaatcatggatcgtttgatgacttgttctcgtcctctctgcttgttagcttgtgttgactaccccaaagtggaccttatatgcctacaggtaattgtatcaacccggacaattcaactttacttctgtatttgtaaagaaaaatgcaatgttatcagagatactagagtcttcatttcgatcgttatagccacgcttagtgtctggtaacaacttagttcaatagtgatgaagatgtgtccgggccagatgttgctgactatttattattacgggctgtggatttagcaacatcccccggtccaactgttgccacctttgcgcatagcatcatccattcccaatgtgacggttctagggatgcccgtgtttgctcctcccgaggctccgaaccctttcacaccgcttcgccgatcattgaggtcgtattttcccgtttcaatgttacgatagatcctctcagcaacttccaggaacgctcgttcaacgccatccccagatttggcgctcgtttcaacatagcgaaccacattgttcaagcggcaccattcttcggcctcctcctgggtgacctgcctttgatttgatccagaactggcccccgtcagatcagtcttattaccgaccaaaataacaacgatgccatcttctgcaatatgccgtagatcctgcagccactgagtgcaagatataaaggtcgagtgtctggatatatcaaagactaggagagcgccagaggcaccccggaagtaagagcgggtgatagacttgtatgtctcttgtccagcagtatcccacagtgatagtttcatgcgcttttgattgggggaaccttgtggttttcgtggaggggtaggaagaccagaggtggtagacgcttctggaaatgtatcacccgacgatccggtagagggctcatcaagttctagctccagtgaagctggaggaccaactggcacaattcgcgacccgaactcgacaccaatggtcacatcatgagatggggaaaaacggccttcacaaagtcggacggtgagctattgttcagttagcgtaggtccaaggtccaaggctgatagcacttacgctggacttgccagtgccagagtcaccaatgcagacaagcttagcaatataatcccatggctgtgacatggagagagtagaaaaaaatccagaatcagaaatggggaaagaaagcgaaggtcagtttacctacgacgtatgtcgatttggagacctcatggttatcagctgagtcatctatcaagcctgacgtgcccgaatgacgctttcatcagctgcgtgaccctagcccttcaccttatcccaggcaccacacacatcctctctcctagatttggcatatctcaaacaaattcaaagtctttcctcttaccctctcttccctttactctctaatatccgaccgtacttgatttcctcgacatatttcctttagtgatctatcactggtcctgtcccactcaccgtactttcttcgttacgataacaggccatgttctctgaatgtaagaactggaagatcctgagtattagaagactatatggctaacacttcgctttagatgcctcccgattccttgctcagtcacagtcacgagtaacctctcgaccagatgaggttcaaagaacgggccgtagccgccctggtcaacatcaaggcaaccctcgacacccctcatcgcgctccttcttacgacctaccgatccttatcgaccgggtgcatcccagacagctcaatttccttttgcccctcgcagctcggttcaacaagctcccctcttcttcagtgccactgatgagttccgagaggaagatgacgaaacagaacgtgagcgagaaatagctgatttctatgcactccaacgatcaaggcggcattttggcgacagcaacttgaaagaatcttcagaacttgaggattctgaacgttcaggtcttgaggaaagctcaccatataacgatcgccctggcaaaggcatcaagagctcatggcggggagaagaaggtgtttttggtgcccgtccttttcctatcgagtctgtggcagaagctccagagcacgaacaggcacctcggtccagcccaagcagtagcaaagttcgaggccatctagttgatatcggtctggaggattctttacgggccgattttgacgatgatcagacgttatccagtcccggtgctcacgacccacctgttcagcgattccgagaacgagaattactgaaggagcactctggtaccagccagcatggatttactggcgaacaggctgagattttatcgcaagacgttccacggccgccgagctcggcaagttcatttccaacaacggtttcaccgctagcctcagaaaacacagtgcacgacgccttttggggccatttatttttgatatctctcgcgggattatttgcttctgcatttctcgtatatcttcacacatctaccccgtctggagacaaatcaagatggggggatacaatctacatgactgtccatcgatcgttcttcctcctcgggatatatactattgtatcggttcttgtgtcccttctttggttggcgttactacgatcctatgtgcgacttctagtccatgtgattctagtcgccgttcccactatattatactctttctccttgtatcctttcatctcaagtttcaagggaccgtggcatggcaccagtatccaagacaaggcgatgaggtggggctctgctgtcccgtttctcatagctaccatgtggatctacaatgttgtgcgtggccgtcagtctatagggaaggccataggcattcttgaatttgcctgtcgaatcttggccgccaatcccgagctgcttgctcttggtctgggtgccctaatctgcgttgtctcctggacgtggatctggatgctgatgttcactcgtgtcttcttgggcggccaccttgttagctcaagatcgttcatcattgacgtgggtagctggtggctcgctatctatttcgttgtagtttatctatggtcggtcggcgtcatcgcaggcatccagcgtgctgtcaccgctgcaacagtgagccagtggtatttccaccgtttggccacacccgcgcccacctcgaggcagattgttcaggcagccatcgttcatgccgccacaactctctttggcacgatctctttgtccagactactcgggctactggttcgacttcctcttctattgctaccagatcgcatctgctcgttgcttagcctcttcgcctattcactcgttcccaccccaattacttacttgaccaatcctctttctctcacctatgcagcgattcattcgcaacctcttgccgcctcctcccggggtttgagccaaatgactgtccttgccccatcggcggcctccacgtctttaaacccccgttcatattctcggtctcccaggagctctgggtctttactctcatacaggctgtctaaattgatcctctacgctgcccgcttcataatgtccttggctttagggttcggcggttgggtgactactgctcgaagcctgacaatgtcggcatccggtggtaccattcgtggcagtctttatgcctacgtcgtcggccttattgctggaacaattggttggaccacactgggcgcaatggaaggtgtgatcgcagatattgtagacgcagcggttatttgctgggcaagcgaggtcggtatttacggcagagaagcccggtattgccgcgaggctggttggctctttggtgactcgcagcctcacctagggcatgaatatcaagaggtctaggtcgttttttttttgtcgttctttcttcatcttataagtccctaacgcattctctctcatggttatgacatttgcaacaatcctttgtaccattgagcgttttaaaacattcctatatactttagcgaaattcctaactctcaagtagaagacttgacaggcaaatacattctacatttatatctcggttgtacgcgattccaaagcagctagctctctgggaaaataatttattcttttgcatgtcccatggtatattcgaattgcaaatagctgcatgaaaatccagggctcgtggtatcatgagaaaatataaagagaaaggaaatgacttgtgcgggaaaaaagacaaggcctcccctgagacgccatatgaagcatattccgagcgacgaggagaacaaaggagaaattatgaaacatgaatcagagaccaagacgtccattccactctactcgttctttcgagcaccattctttcagcagggaccagccaaaccgaacaacttcgatgggcggggtagtgccaccaaatggtaggaaatagcctccagcataatctccagccctgagggatgatcggcctctttccgaataatttcgagatcgctgcgaccagatcgtggggaactcacgcccaaggacatcttcagaaagaccccgggtgccctctacccatagtctctgggaatccctgtaggactcaggaagacgagccttcagttctgaaaattccttcctgcttttcctgttctcgtccgacagggctgcgtttccatcactcccaggcgtaggaaacggggtgtgctccccaggaattgggcttacagcgaggcgttcaagatcgagagtgtgaatggcagtccaggacacagccccaaggagcaaacagagactgtttaatgccggatatggtacactgttctttctgaccacacgccagtatggcacaatagacagccatgtcgaggaatcgccgacctggcgtgacgaagctttggcctggtcgttcgctacaaatgccataataaaggacaacaacgcttcgattgcagtcacaacggctagcttttcgtcagtgaccgaggttccggttttggaggtatgccgctctgcggcatgtttcaattcacgcccgatgctagcaaacctttgccactcatcccaccataactgccgctcattgcgcgtacgaccatctccctgtgtcggagaaactttcagggttgacccgggatcaacggattgacgtttgttggcgggattgggaggattcttgccatcggtcccatcggtctgtccgagatcatttcgacgagaggcaggaggttttacgtctttcagcggcgtgatggaagctggtttggttttgtcatgggtgattgaatgagaggtcaggtgttgctgaggaaccggcgttcgaggcttttcaggtaaggtttttggctcccttgaatgaccagcttcaggaccaagagcttcctcagtctcatgcttcttgcccttcggatccgcgaatgtgtgcccacgagacgaaccagtatctcctcccctcttcctgggatgagagatatcatcacgatctgtatcctggctaaccggtgaatcggacagatgggctttccttttaccagagaatttaagcagagcttcgacacgctttcggtttgctcttccgtaccgcagtttggtaagaagctgcatcttttgtgggtcggcacgagtgtggtctcttgtatgttcgtggatattggattctttggcaggcaatccttttcctgcccgactattgcgagacggtgaacggtcctcaaggcgagccaactccctttcgatgtctggggggagagtaggagacagcaagcgcggaagtctagggccacccgatgtcggtgggagagtaggcgaaagaagtgtggggagcttgggggagtgtaatttggcagggcagggctctcggtgtgtctctttctcgggagagagccgcagtttctttatatgatgtgcctcggacttcttagttgctgaggggttatggtattcaggttccggcccagacggccgtttctggcccgctctttcgggagagagacgcgtatgtgactttggcggcattcgaggcaatttagtcttatcgttattcttgaggggttctgaagatatcatctgtcgtctttcttcggacttggcggagcttgatacgcctcggctacccgcttcgaggccaacgggggatgcgacagggccactggtcttctgagtcttgtagtcctttaggctaatcttctttttggccactgtttcccttgaactttctccaacgcttggggctgttgatcgatcggccatcatgcgccctgtttcgtctgaccagtccccgaccgctagaagcaatgagtctgtgtcgtggtgtgtcaagaaggtcatatattgtagttgctgctcctccaagctgaagggtctgtcatgccctacagcccaattgttggcgggccggttccccgggttaaagggcgttttggtcggaaatgtgagtaaatatggaacgggggggagaacgtcgtccgagaggtgctgtaatcgttggtcaagaacttcacggtccgacgtggaggaactcgcagctcggaggtttgtagtggtttgggaatggcgtttctcgttcaccgacatcgcagtgcgcagggtttcgcgaattgttcttccacaagagatgctaggatgatacgcgcttcaagcacaatttgggccgaagtctatcaccgagtcctgttgctcgagtcggtatggcgagttgcctggtgatagtcaacgcattgagttaagtgaaggatagtggatgtacaagatccggccttgttcaggtgccgaataatcagggcatcctatcactatcgcgcgtggggggggtgttcccataaccctgggatttcgaagccacgcaattgggagggagaactaaacacagggtaacaaagaaaaagtgggatgtgtcacaatgagagggtgacctctttccattaaggagcgagagatgggaaatgtccccggatagaatgaaagagaccgatgaattggagaaggttacgttaggtcggttacggtgttgcttatcggcttatcgttaccgtataatttcattacatacagccctggaggtacttgcacatctattgatgaggatatataaagtctcgaacacttatgtacatgcacatgcacatgcacatatgtatatgtaggatgtatgtgccttgtcggcctggtaggatgtagggaatgaatatgtagaagttactccatgccagggttgtgttgttgaagcctcaccgttcaggaacggtcatcatcggcaaacttctcacgccagaatgcacggtaatgtttctgctcgccaaccttggagatctcatcaacctcttgaggagtcagtttgaatgtaaacgtgcgcaaatagccgttcaggcgggattctttgccactagtggtaatagccacacagccacggtcaattatccagcgcaacaagatctcggactggctgactgcatacttggtggccaaggaagagagcagagggtccaatggaccaccctgggcccgggtggcaggggtgagacccccataactaacagtcttgatacccttactctcttggtagggaacaagattgccacgttgaaggtaaggatggaactcaatctgattcacagatggtaccactttagcggtctcgagaatggtctccaagtcgctttgtaagaaattggacacgccaatggaccgggctttcccagatgcctttacttgctccattgcggcccaggcagcttgaagtacatccttggactttgcgaagtacggagcatggatcaagtacctgctccattgattagaagcagtccccgggcgagccattactcacatcacgttggagttgacttacagatccacatagtcaagttggagcttcttgagactggtatcaatagcctgaggaatatcggcaatattggtgatgaccttagtcgtcacggtgagtttatctcgagataccccgctttctttaattgcctgccccagttcctcctcggtttggtagacctcagctccatcgaggtggtagtatcctagcttcgttgccatcttgatcgattcgaccaattcatgattgataccgatgtcagcggacttcttaaaccacgcggtaccagtgccatatccaagctgtatttgttagagaatattgcccatagtatctatgaatgtggggtaatgatagataactcacgatagggaccgaggtaccgtcattgagatccaatgtaggaatagatgaaataatgtttgccatgattccaaggtgttccaaaagagtaatataggatgatgaaaggtgttgtaagggatacttgggccgtggtacctgggggaggaggggcttgtccacgctagacccgtggactgggcaatgattaataatgtcaattatgtcatttctaacctcccgggagctgcctccagagctctccatacttccagtggccactaccttcacttggatccatatccccgaattacttggtctctccctctctctatgaacttccgtctgctcgccgcatgttcaagaaattggtatatgtttccacgcagctttcggccaccgtcggttcggaaccgtttaaaccaaatggtatcacatctttcgactgccgggatctcccttgctgagttaccgaaatcaaatattttcacatctaaattaccccatgatccggctttcgatacaccggaattgtctcataaggccccaagggaaactttggggcctcgcatggtcaatggagctttgttcacatatattcgcccagagcagactgccgagccagaactactaggagtcagttcgaaagcgatgaatgacttgggattgaagccaggcgaggaacaaacgtctcaattcaaggcactagtctccgggaatgagatttggtggaacgaggaacagggtggaatctacccatgggcacagtgttatggaggtcagtacccacgttgtcatgcccgagaaacccagatgaaactaacctgctcaggctggcaattgtaagctacggaggaagctagatgtgacttacagctgacaacatgcagcggttcatgggctggacagctcggagacggggtaagctaatggattaacatgagttctcagttcactagaaatactaatgattgacaaaatagcgtgcaatcagtctcttcgaatgcaccaaccctcagacaaatacccggtatgagctgcaactgaaaggagcaggcaaaacaccctattcacgttttgcagacggcaaagctgtcctccggtcaagtatccgtgaatatgtggtttcagaaggtaagtaaagctgtatgaaacccaaggatagaccactgaaacattgctagctctatctgccctcggtataccaaccactcgggcactctcactcaccttgattcccaatgccaaggtattgcgagagcgtcttgaaccaggagcaattgttgctcgttttgctgaaacttggctaagaatcggcacctttgatctacttcgtgttcgcggagatcgtgagttgatcaggaagcttgcgacatatgttgcagaagacgtttttagcggatgggaatcccttcccgccattgtatcgctgggtgaccagcagtcttccacgcaaatcgataatcctcgtaggggtatccccggcgatcaagtacaagaacaccaggatgtacaagaaaatcgatttgctagactgtatcgagaaatcgctcgccgcaatgctaagacagtggctgcatggcaggcctacggcttcatgaatggcgtgctaaacaccgacaacacatccatttatggcttgtcactggactacggcccatttgcgtttatggacaactttgatccccactacacaccgaaccacgatgaccatatgctgcgatacgcatatcgcaaccaacccagcattatctggtggaatctggtccgacttggagagtcattaggtgagttgattggggccggaaatcaggttgacgaggaaagcttcgtcaataacggggtgacgaaggaatttgaaccggaactcatcaagcgtgcggagaaagttatcgagcgtgtgggtgaggagttcaaagcagtattcctaaacgaatacaagcgcttgatgggccaaaggctaggactaaaaacacaggccgagtcagacttccagatacttttttcggatatgctagacacactcgaagcacttgaactggacttcaaccacttcttccgccggctctcagggctgcctctatccaatctggagaccgaagaaggccgaagggaagcagcctcggtcttcttccatgctgaaggtttcggtggaattggatacactgaggctacagctagagatcgcattgcgaaatggctggatatttggcggcttcgcgtcctagaggactggggccccgcaaacgacgaggaaagacaaaaggccatgaaatcagtcaacccgaacgtaagtatctgctgaaatcttccttttgaagtccggtgcccatcgactaacctattgatagtttgtgcctcgagggtggattcttgacgaggtcatcgagcgtgtggagcgcaaaggagaccgagatattctaggccgggtcatgcatatgtctttgaatccattcaacgatgaatggggtcttcacaacgaagaggaagagcgtttctgcggggatgtccccaagtacaaaagggctatgatgtgcagttgcagctcgtaatcaagctacgagcgctataccgatctcagttctctgggaggcgagtgtatgatatatgacttttttaaggaaccagaaccgattggagctagatagcaaatgcatcggctcccacgagatagcctcggagaattaaacgtgcaaatatgagtatttgccagactccctacttcacattttatacgcgttatcataaaacccgcgaattaccaaacaacctaggtgggagtcatcaaagttagatcgtgtcaaccttgtcaggcgttgatctctaatcatacattttcaggaaaaaaagagaaattcgtttcgtgcatgcatgaaaaatgtcgtccaatcccatggaaactgtagaaagatgttgaccaaaagagcaatgcaagcaatgggcaccctagttagggcaagcggactgaacgtggccgggctgcttgcacttgtagcacatgcgctcacccttggcctcagtggggcagtcgcgagagacatggccgacttcgccgcctacttacaagttagtagcatattccggcgaatgagaaaacccggaataactgacagttgtagcacttctgaccctgagtgcagtcacgggccatgtggccgaagccaccgcaggagtagcaggtctgttggcgaccaccggcaccacctggaccactgaacccaccaccgtagccgcctccagcgctgtaaccaccactgtagttaccaccctgggagcagttccgcgcgatgtggccgacctgtccgcacttgtagcactcctgggaaccaccaccgctgtagttgctgtcgcctccctgagggcattcgcgagaaagatgtccggtttggccacaacggtagcacgacttctccttggcaggttcctggcattcgcggcctttttaaaaaaatgttagtcaagtccaaatagagtccgcgatattcaattccaacttactcaagtgaccttggcctgaaattgtgattgaattgattagcaacgttctaataaccagtccatagatccaatggacgattttgaagtgagcgtaccgttgcaattgtagctattggaggactgggttagctttttgaattgacagatcaaagggaaagagaaattaccaggtagggtttcccttcttagggcagtccttggcctagaaagagcagataagcttcgagtctccttttttaaatcaagttttcaagaggaaatcgggcaaaggttgtaattacctggtgggaggcctcgccgcctataaaagaagagagttagtaaatatcagcttgcgcaatagatgtcgcaatagagccccggatccaattcgagtaccacaagctctccgaatgaatatgacgtattcacaggatttgaccaagccggtgcttatttctcccagtccaggttgcagtagaagggaaaaaagaacttacagttgaaacagccaccacgtcctgcaggagggaagtccatatttgaataaggggattgggaattttataagagggaaagtaataagtcgttaggaatgaagaagttgaagaatctgaaaaatataatattgtagtgcggggagaaatcttcccgcaaagctgaccgccctgaagagagaaagagatggacttctttttgattcaggatattcttgctcgtctgcttctttctcacttggatattctgttttctgggtattctgttcttctctggattccccccagtcctcacccgagttttctagaatggaagtcatcacggattcagagaatgcctgccctatccctttttttatccatttggaaaggtgtaatgtaatggatgagaccggagaatggaaaataacaaaagtcgaacaaagattcagggtccaacttttatatataggagaacaacccctgtcttgccagggtccccagtccaggtgggctgagtaccttgtgctaccgaacgcccgctaaacaacacgtcacagccaagttagggaatgattccgtcttcattatctgttggcatacctcgacaatatatatatatatatatatatatatatatcttgtgttaggtgaagtcgtaacactcaagtagctgtgttccggtcctttctcgaaggagaagtacccgttcatcatcaaatccgataggcacagtcacttcttgagtttccagatccacactgcccaaactgtggtaaatcggtcctaatcctggttctggttctggctcgggttccccgtccttgttcccagcgttgagctgaacaccgttctcctcgaagaatttgcggctgcccagggatgatatcgccatctctaactcccatatccgaatctcatcccctcgagagcttacagagacggctttcccgcggttggtcacctgaacagcagatacagaagaggtgtggccccaaagtcgccggcctccttggacaaacaaagattccaatgtagatacaacaaggtacatagtcaacgtgttatcggcatgagaggtcagcaaatatggatgggaataggacatagaggttggcggctgttgatgtatgatagacggtgtcccagggtcaatgggaggttgattgtcgaccgactcggttgcagagtgccgcctttttctggattgaagtggcctcaatccatattgggaatccactgtagtggccagtcgggaatcgagttgttgcccatctttgcctagacgcagttcttgtatcccctgagaccacccacagccaatgtggaagaaactatacacaatagtagcgacaatttcaaacgacgaaactctaagagatagtgtcatgggtgcaatcatgttatctgccttgagggaggcaacccggaggggctctgaggactcggcggttgcccccggttgatggctgccaggttgcagattgtacaaggtcaaatctttgtgctgagacactaccattaaatacggcgacgatagagcaattgctgttatagcagcatcactgcggccgacatgagaagactgcaagtctagctgggatgtttgaagatacaagacgaagaggctgaaatgaccattttccagaccaactgagatctcgatcttatcttggatctgacttactgccaaggcggttggagtcataggtgatgatctcgatggagttgacaaaggaactcttgcgagacaacatgctgaatctcttgtggtccaagcccggagcccgtgcgctgagtctgccgtaaagacaatcccagcacaaaacttgactagcgtaggagggcatggcggccgaggaaactctacctcggtaacccgacatagccctttggaccagttatgtctgagccgatactgccgtttccaattgccttcctgtgccaagtgcccgtggtcgaaccacgttgcgaccttgggcgaataatctgtcttggatggaagggttgtgcgtctagtatttgcaaggcggcgggcacggggccgcacccattgcgagtagtattgccttttccatatctcagagtctccaccaagaacatggaagcgatgtgataacctgaggtagcaagttagcgagacctaccgagaaggaccgacgaaaatgagagtatatatatacctttgacacacgttaagggatgatactggtagaaaagacagaatatggagcagcaactcattgctcagacgagacagacgatcaacaggcctgatgtcgttccgagtacggatccgcttttgcggtagatcggagtcccagtggtctctgcatcgtttagacatcctttctcgggctaaggaaaagaagaaaaagctttgaggagactagtagaacgaatcggagaaatcattccgcacgttcagagaaacaatagtggttaaaggtggagggacaattgtacgtggagttggccccgagccaccgaggatcttatcagcaagtgataagctcacgtgtgctcatttagcctcgacgcgtcgtcgcgtttatatctctacctgacatgacgtctacagcttgttttcttttccttttcattccgatccgtgtggttaccctcggtgctataatataaacctcacaatggaagttgtcaaggagctccacgctgctgtggcaaatgcatgtgaggaatccttcgacaatgcctataagcacatgaaatcccatattgatgcatacgtcaaagaggcaaaattaaaagaatcaatggccagccaatcacagcgacgatcagagaccagaattcgagagcttgaacatgatattacggtactccggagtgagctgcaacaatatgaagttgatccacgggatcttgaacttcccggggaatatgccaatctagagaccgaatttgacccgaaaaacctgtggggggataacctggaggaggaggatcatcgcagttttcggaagtctcggaacagagttgaggccaaatacaccgcgctttatacaaatttacagacattcatccaaacttggagtggtctcaaatctcgagttttgcagcataaaaagaagctacggcggtgggatcagcaattagagcgtggagaattctcgcttgttctcaatggtcaacccgtcaaattccgcagggtggaaagtcccaccttcgaggatgtcgacaaacactcggagacccaaggctcctcgaagaaacgcccaagagaagagtttccagatcttcctgccaaggccatcaagttgtcacaaagaaggtcccgcgcagatgatgaacatgcagatataagagttgaagatgataaccaaagagtaattcacggcttaacatcagagtcagcctccactcagtctagttctcctagacccgatatggaaccctcagaatcttctgatacaatatgtttcctacctcatgcctgcggggagcagactcggcagaggctttccccgacacttcccgacaggtgtcttgtgcacacccagcggacggtgatgagcttggagcgccctgcagttgtcaaaaaagagatcttgtcctcgagtccatctcgaggttcaatacacaacagtgaacagccagttgtaagcacgcaagatctggatgagataggggacacgatacggacaccaatcaaacggaaagcctaccgggatgtcaatgtcgcacatcactcgaaacgaattccgataggcccgcaagtatctcaacagccatctataccccaaccaggtgacagcaacatacgcaaggctacattctctgtacagggatcctccacgaaacgcctccaagatctagagcgacgcgcaataccagctctggcagaagacggcgaggacgcgacctccttaccgacgtcttcgaaaattggctccggtgtcaatatcagaccttcggaagccaagacaaatagtggatttgcacaaagacgcctggaagaccttttggaacaatcggtgccccccagatcaccacttcatttgtcgagcaaagtctccggccttgattcaccaaagccaaacgatgcaacccgcagtgatcaactaacacccaagacgttgagtcaaacggcgccaaatataaaccccgatgatgaaccatttcgggcaagacctcttcgttgtcttgggttggaacatttcaaaatcaatccggctagaaatcaagggcttgattacgcatatgatgcagttatccgaaagaagcatgaccgcaaatgcatatcaggctgcactcgcccaggatgttgtggggatcggttccgggctatggcccgccttgggggtttccccggtaaatctggagcagaacaggagaaagaagatcaggcaattctacaggaattcctgggagaagatacacaattgcttcgaaacatgagcggtgaagagcgtgaaaatctcctggtggaagcgagagccagggccctggccaaccaatatggacgacatcggcatacccatcagcgggctcaatcccctcctggcttctggcggactgagatgccagatacacaggaggaggaagacgaccttgaagctgccaagaggttggagcgtgagaaagtggaagagcgatatcgagaggctatgcgccctggggggttatggacatgggcggatgaatgatgaataagaaaaacatatttctatagcctattcaatattgatttatgactagaaacacatcatgaaaggtatccgaaaccatctgttcataggtaaatgtaagtatgaaagcgtcaacctcggcccaaggcatcttggcagacgcaagacgcgggaccacgtgccttgcaacctcccgaggtcaccctccccatctcctccgtcgctatctcaacatgcttgaagcttagagatggaaaccgttcgcaatatccagaatccaataccgccggtgctcttgcaaccatctaaatggctttctatctatgaggacttcgtgaccaagaatgccagctcggttggtcaagtcgagtcagcgctgagatctttgacttatatcatcccaggtgagttctcattcggtttgaccatgcaactgttcaataatctaacagttatcttctatcagggcgataccgcgaatcagatataccctcagaatgtggtcagtgtaacattgtacttgcctttgggcacgcctgctgatttcccctgcagtacactccggtgtccagttgttatcgttataccatgactctcttgtttcgcgagttgttgataggcttccgtccactgtcccccgaccgccgcccactccccactcccggtataccaaatactggacctctcgctcctcgctatatcgccaggtagcgcttgcgctacaaatgcttcagtataccgagcttctctgggagatggcagcgcggcggcgtggccagaaaacccgttggcgcgtggtcatctttattgaatttgcgaaggcagtctgccgattgcttcttctgcgattgacgaactccagacctctcgtcagtcctccacttccagagcgcgagatagatccaagaaccacagaagaggaggaaccacagagtggttggaatggaatggacactccggtcagcgagcggtcttcagacttgagttggaccatgcctcgcacgggactttcccttccgtccctgcccgacgtaaacgatgtgtcgaactatctcatctccaaagtgcttacggcagatgacattaaacccccgaaggcactcctccaccgggcgacaggacaagggcaactggctgaagtgctatacatccttcggcctgtcgtctatgcattggcgatgcaaaagtggagtggtgataagcgaaactggcggccatggcttattggattcggaatggagtatggctgccgccaactcgcaaagcgggacttccgtgaacgggtcgctggcggtcttcgggggtctacagggcttgagcgagaggaactgaagaagcgtggatggtcaatgggctggtggatgatgcgaggcgcattttatgagaacgtcaccaagtaagaaccctgcctctggtctgtctctggttttctgtttaaatactgacattgtgaaacaggtcctggctacacagtttaactggaaagatgaaaggcaagccattgttagacttggtaagcagtgttgtggaggactatgaatacctttgggacaacttctacttctcgactgctacgctgtgaatttccacagatgagctcagattttactcacccatgatacccattatttctatgtacaagtcactttttatgctattccatttttcatttgttctcactcttgctgtgcttcgcgcaaggggtatcattagtgttttattaagtttcatgtctaatcacatttcacggagcgttcacattcagagaacctcagtttgtctgtgcccataccaatctcgtaatccaaccttgcccatgcttttcccgggggctgatgatagtaagaactcatctaaccgagatgccccttcctcctcttcgtcgggccagtcgactcttgctcctcctttcatttcaagcatctcctttgcagtgccccagctaaatcgacactcattgccccatccaaacacagggtccatgttgcgccgaagccatccgacacacttggagtccgagggataaccacttccccaagtctcggaggttggtgtcagtggctgctcagcccggagcacggcctcgtacatgacttccagtgcaacgtcccgcgtcaccttggctgccacactggcggcgctgacacatgggtacaaggaatcggctttctttgccactgtgattttgagggatgggaagattcgctccaatttttgctggtatgtagcggggttcccaatcgtgtcaatgtatacttctcgcacatccactccacggtcttcaaccacccctcgaatgatctccaccgtggcatccatggcctgggcattcagattgtacactgcggtaggtgatctcatcatgccagaagagatatcgcgcgccgaaagtactttgaccgcatatccgcaggactcgaacaatgaatctcccggtgtattcaatagatgcatcaagttcgctcgcacggcgggtgtaaggactttgctgtcgtcaaagctgtgtttctcggtcaaaagcgagtggtgcagatcaagagggagatagaaggcaccgtaaaccattggccctaggactggaccacggccggcttcatcgacacccaagacacatggtgtactctccagtgtatcacgaattgtggatgaggtcccttgaggcgtgattgcgttggggcatggggtgtagtacgcgtaggactcgccggagagaagtggttctgaaatcacactcggaggaataaaggtggacgattcctttagtagattgacggggggagtatcattaggcataataggcatataggacattgaaagaaagaacaaaagaaagtcttgaaggtacaaagaaatgcaaaagatctcccgagtgcacaactgcacaacgcgtcgactgttcgggattagcgggggcgcgtgttgctcttcccgcctaaattccgcattcctcccctccaccttgtctctcttttgactgattttcttgattctctctctatcttttgatttcaattccatcctagtgctcaacttccaatatggcacgagggcccggaaaggcccgcgacttcgactactccaatgtgggaactaagggaaggtgagtcgatatgttttagtcaattccacttgtactaggaccgctaaactgatccaatacgtctaggcgcactggcatatcgctgaaggaaggtcgacgcgatgaacatggaatggaagaagttgacggcctcttctcgtctcctgaaaagtcgcctgtgcagctcaatgggtttgaagaggaggaaaacaactcttcggctgggtccgagggcatgtcgatggacgaaggtgggctgattcagtgtcgccttatattgccgactcattgcgtgctgatgcacattctataggcaatgcgccagatcccatggactttctcaagggcacaaatggctcacgtacctctttcccccccccgcctgctgcgcggtcgccgatgaagactggcctcactgggtctccgcggaggacaccagcgttgcaatcaactccagacccgcaggatattcttgagtcgtctagtccgtctgacggcaaaggtttcgcgggcgcaccggaagaattacgccaagatccatctcctctttccactcgctcggtgaacgtaggacgctcaaaccagaggaatggcacacggcgaaaacccacgacaaaagcacagctagcgtcagaatccgagcccgcagtcatacatgacttttcagacttttccgacgccgacggcgacggcgacgagaacgcgagtgcattcgccacggtacaacaagattttggtggcagtctggatgtagaatctgattcagttgctgcagagaaggtacccgattctcccgggcaagaccaacacgaacatgacggcaattcatccacaactgacacgactccgcctcgggaagaacccgttctggcctccaagtcaacaaagaaggtggcgccaaatagtaccaaggcaggcaagaaccaggcaaaaccccctgcgccgcgcggacgtccaaagtctgaacgtcgtaacgtcgaagaagatgccgaccccaggccaaccaaaaagcgaaataccaccaaagcatctccaccggtgcgtgaacctttggaaccggaattggatcgggtggttgaggattacgccaaccgcacaggacctttgaagggccgaagtttgtatatcctcaaacgtgaaatccccaccgacaatagtgcaactcacactcgatctgggcgggtttcggtccgaccactagcatactggcgcaacgaacggtgcgtcttcggtgacggggaggcagccgagggacatcgataccctctttcaaccatcaaagaggtcattcgcaccgaggagcaagagcccgaaaagaagaagaaggggaaacgctcaacgtcccacaagtctaagtctaagaaacgaaaggatgactcttcggacgaagatgaggatgttgatctctgggagaaggaaggtggtgttcttcatggctacacactcaaatgggacgggaaaacacagacgagttcaaaggaggaggaagtactaggtatgaaccccagccccttcatatttggttcctttactaagtcgatcttgatacagacattgcgtatgctccctctggaatcgaaaccagagaagtcaaagactcaaccttccgatttgcgaagctgcttagctcgtctttcatcgggtctggcgttgtggagctcccacctgacggagtcaagaaacccaagaactccaagaaaatgcatatggtcttttatgtctgtcacgggcgtgttcaagtggatatctcaggtgtccagttcagtgccggaaagggttgtgttttccaagttccccgtggtgagtctcatgttcatggcttcttgattcgtatcaattctgacgccatgatcccatctccaggtaattattatagctttgcaaacacccaccaaaaggaggctcgacttttcttcacgcaaggctgtgtccccgatgagaatgagaacgagaacgaagacgaaacaccgcaaatgtcccaggatgtcggccctgagagcgaatttgaagccgacactcccaccgctcctgttcatgtccctgcgaagaaagccaagggtcgccccaagggcaagcagaagaagattggcaaatgatctctccatttactctgcccccacttctgttttcatgtttgtaggcatcgacaacgcgccatgatacctttcttctacgtcaatgcccccaagtctcattttatgggcatctaaatgccttttattgttattcgttcttcagcgatttgttttcatacgattaccagggaatttggcgtttttttgcctgtttctccagttaattatgcaatatctattggtgataattggtgatggaagagcaaccgagggaagctgggaatcagaacctcatgtattcgaaactatcgaaatgtattcgttcaaagtacacatactcagtgtattaaatctcctccattaggtcatctaggtcgtcatctagacccagcggggggaattctccaacctcgaccttctcgggcttcacgaagacgcccctgttgcctaagcactcgaagtagcgctgtccgcccacactaccgtcattcttccccatcggctcgtcaagctcaatcccgacccagatcggctggagatctgccggaagctttgcatcctgttgcagctcgcgacccgggccggtaataggaatagtcggaacaggtccaatgaagcggatcgtgccacgtcgaatatgcggcggagatgaaggcagaacgatagctcgtctagcaacagtgattcctgccaatatattattagattaatgaaagaaaaataaaaataaattgcattgacacttgaaattttttgtttcaacgaacctctcgtttgaatctcggtccggtctttctcaacttgatgtcgcaaagcctcttcgggcgatagagcgttagggtcaaaccgacccagcttctggttcttcttccaagccaacacagagtccgaacgggcctcgtatgtctcagttggcagcacatatttctcgactgatgataagtcggtaaagttagcccgcatggtttgcgggcggttgtcattgacctagtgaggggataaattagaatatgcccagaattcgtagcatatccattgccctgacaactcggatcaaacgacatgccgttttgggcccggtaaagcagccagaacagggtcaaatgaacagcaagacatagaaagaaaagagaacccacctcgatctccgaccccttgaccaacccccaatccccaatcaggcggtcgtccccatcggcccattggtcaggtcgaccgggaactttcacccgcaggcgctggcatcctggtgggattcccgtcatagtctctaactttgtcttaacctgcatcaccgtccaagttggggtgatgcggcgttcagtcaggaatcgaggctccgaatttccaggtttggctaaagccgcgttggtgatgatgacggagatatccatcggggtaggctggaatgccatattttctttgtatgacttgacttgtctgttcgtgtttctaggaagaaatgttagactgggctgtggattaatgcaaattctttgatggtagggtgaggcattcaaagaaaacaataatcgaaatcagacagctagattcaagatcctgtaatccttaagggtaaaaaaactaaacaaggaagactatgcatactattgcatgctgaatcgctgatatcaaattcccctgaggggcataagaagctaccggtacttgccagggcaactttgtggccgttggaaggaacacaacatattctagacgaaaaggacagtccttgaaccgggtaggtagtacttacagttgatcttgtgctcccctgtggttgacaggaaaaagaatatcgcccaatctcgaagaagcgattattagtaagcggtctccgccaggaacaggcaccgcttgacgctacacgcagttgagaatggaatcgacaaatgatatgtgagatgtaaagaggacaagatgaaactaagagccacctatttggtgcaggttatgtagataaacaattgcctaaacgggatgtcaaaacgatgtcaaagtaagtcaaccttctgtaagaaattgatataaaaacaagccacagctttgtagctgatgaagcttaactacttacgatatatatgaatactatttgtgtttaagtagtactggcattagaacactggggagccacaaattactacatagactaccgcgtgttaggaatacatatctagtcattcccatagaacaaatcaagtctaaccctatcatggaagccaggcatatcaaatataggctataatctaccatattgtgcaatatatcctatactatgccatagtagcttgcattctcatcagcgttcatacttcacgactgaccctttttatacaactctacaacaattggtcattttccaattaaaaaatagtcaagacagccaaacttgacatgattcaagcttgatactttatgctttttggaaccttataaaaaattcaacatcgcgaatatgatgtagatattatgcccgttacaaatcgcgagccacgtgatatccattctcgcttgacttttcaactctgcagcagctcccaccttattcacgacgagagcaacatggcgtcccaacaaacaggcgaagcgtatgagcagcaaaatgtccatgaggtgtaccaagagatcgctcagcatttctctgccacccgctacaaggtgtgtttcaagcgactggctatcaccaccttagaaagttccaactaatcacaattctagccatggcctatagtcgagcgatttctcacaagcctagaaccaggtgcagtgggtttagatgtagggtgtggtaatggcaaaaacttgatggtcaatcgagacgttttcatcattgcctcagataggtatgttctgatatgaattggattttctataggctacttcatttccctaggatatcatccaacttgtccattggatcccttgagcttgatctgggctaacccggtggcagatctgagaacttggctcggattgccctgcaacatcagccgcattcgaccgtggtggccgatatccttgaccttccacaccgggatgcaagctttgact
